(19) United States
(12) Patent Application Publication
(10) Pub. No.: US 2022/0145302 A1
(43) Pub. Date: May 12, 2022

(54) TARGETS AND METHODS FOR TREATING EPSTEIN-BARR VIRUS MEDIATED NEURODEGENERATION

(71) Applicant: Battle Biotech, LLC, Woodinville, WA (US)

(72) Inventor: Richelle Gayle Cutler, Oro Valley, AZ (US)

(21) Appl. No.: 17/093,436

(22) Filed: Nov. 9, 2020

(51) Int. Cl. C12N 15/113; C12N 15/63; C12N 15/86; A61K 31/65; A61K 31/7088; A61K 47/69; A61K 47/54

(52) U.S. Cl. CPC C12N 15/1133; A61K 48/00; C12N 15/86; A61K 31/65; A61K 31/7088; A61K 47/6911; A61K 47/549; C12N 2810/855; C12N 2310/11; C12N 2840/203; C12N 2310/321; C12N 2310/322; C12N 2310/3231; C12N 2310/315; C12N 2310/3515; C12N 2310/346; C12N 15/635

(57) ABSTRACT

Amyloid precursor protein (APP) dysfunction is a key feature in Alzheimer's disease (AD). The sortilin-related receptor 1 (SORLA) functions as a chaperone protein to APP and has reduced expression in AD brains. The APP and SORLA dysfunction results in homeostasis destabilization. Herpesviruses are suspected to be involved in AD pathogenesis. Using a strategic nucleotide BLAST to query SORL1 and APP nucleotide alignment on all Herpesviridae genomes identified similarity sequences from the Epstein-Barr virus and herpes simplex virus 2. The invention describes a treatment to alleviate EBV and HSV2-mediated neurodegeneration by delivering antisense oligonucleotides sequences that target the EBV and HSV2 non-coding sequences to block SORLA and APP disruption. The invention further describes methods to eradicate EBV infection by delivering inducible expression of antisense oligonucleotides targeting EBV genes or an inducible CRISPR/Cas gene-editing system, together with an expression construct encoding anti-apoptotic proteins or with anti-apoptotic proteins for the prevention of cell-mediated apoptosis.

### SEQUENCE LISTING

[0001] The sequences are disclosed in an 872 Kb text file named 10004B-US-NP-Sequences-as-filed, saved on Aug. 5, 2021, and are herein incorporated by reference.

### BACKGROUND

[0002] The age-corrected incidence of Alzheimer's disease (AD) per 100,000 is increasing. In 2000, the U.S. annual death rate from AD per 100,000 was 17.6, and in 2017 that number was 37.3. The rate of AD is expected to increase by 3-fold in the next 20 years. The baby boomer population bubble does not explain the rate increase, and while improved AD diagnosis may explain some increase, it cannot explain it all. AD is a complex disease that is caused by variants in host genetics, which change slowly over generations, and environmental factors, which change much faster. The increasing AD rate must be related to the increasing pervasiveness of an environmental factor.

[0003] The human herpesvirus 4, also known as the Epstein-Barr virus (EBV), could be an environmental driver behind the increasing AD prevalence. EBV DNA is significantly higher in peripheral blood leukocytes from AD patients than age-matched control, p=0.002 (Carbone et al. 2014). Recently, the Wyss-Coray laboratory reported finding clonally expanded T cells targeting EBV antigens in brain lesions from AD patients (Gate et al. 2020). In 1992, it was reported that EBV could transform B cell lines isolated from AD patients significantly more efficiently than B cells from healthy controls (Ounanian et al. 1992). This finding suggests that EBV entry receptor allotypes can increase EBV infection vulnerability which may increase AD risk. The EBV entry receptors are CD21 (CR2), CD35 (CR1), EphA2, integrin receptors (αvβ5, αvβ6, αvβ8), NRP1, NMHC-IIA, and HLA-DRB1.

[0004] Individuals express different EBV entry receptor alleles and EBV strain variants have different cell tropism. Together, strain and host genetic variability contribute to disease expression. Consistent with a role for EBV in AD, CD35, and HLA-DRB1 gene variants are significantly associated with AD risk (Chung et al. 2014; Lu et al. 2017). Notably, individuals with HLA-DRB1 antigen 13 have increased EBV seropositivity (Jabs et al. 1999), while healthy women harboring a single nucleotide variant, HLA-DRB1*13:02, have stable gray matter volume with age compared to a woman that does not (James et al. 2018).

[0005] Endothelial cells express CD21 and CD35 (Timens et al. 1991; Collard et al. 1999). Interestingly, EBV reportedly infects primary human brain microvessel endothelial cells in culture (Casiraghi et al. 2011; Jones et al. 1995). An MRI from an EBV encephalitis case showed inflammation restricted to brain microcirculation (Di Carlo et al. 2011); other case reports affirm that EBV infection is associated with cerebral vasculopathy (Weeks et al. 2006). In 1997, Miyakawa reported electron microscopy findings on vascular pathology in AD brains and emphasized the “disturbance of microvessels” (Miyakawa 1997).

[0006] Coculturing neurons with microvessels or culturing neurons with microvessel-conditioned media kills neurons when the microvessels are derived from AD patients but not when the microvessels are from healthy cognitive controls (Grammas et al. 2011). Another finding that highlights microvessels is that angiogenesis is significantly upregulated in the hippocampus of AD brains, resulting in increased vascular density (Desai et al. 2009). Interestingly, EBV proteins and miRNAs promote angiogenesis (Rivera-Soto and Damania 2019).

[0007] Erythrocytes express CD35 and are anomalous in AD patients (Kosenko et al. 2017). Furthermore, receiving washed erythrocyte cell transfusions significantly increases AD risk (Lin et al. 2019). Interestingly, immunolabeling for CD35 in the brain is mostly restricted to astrocytes (Fonseca et al. 2016). Since EBV has also been found to infect neurons, EBV is likely to bind other cell-surface receptors on neurons besides CD35 (Jha et al. 2015).

[0008] EBV is involved in the pathogenesis of multiple sclerosis, for which myelin loss is the cardinal pathology (Mechelli et al. 2015). Myelin degeneration also occurs in AD, and multiple sclerosis and AD coexist in some patients (Luczynski et al. 2019). Multiple sclerosis is associated with increased amyloid precursor protein expression and amyloid-β deposition (Chandra 2015). Coincidently, EBV cancers can produce amyloid-β deposits, and the amyloid precursor protein is upregulated in EBV nasopharyngeal carcinomas and lymphomas (Khan et al. 2019; Lai and Tay 2016; Nassif and Ozdemirli 2013).

[0009] AD is associated with decreased numbers of professional antigen-presenting dendritic cells (Ciaramella et al. 2016), and acute EBV infection is associated with reduced dendritic cell number (Panikkar et al. 2015). AD is associated with significantly elevated human IL-10 levels resulting in reduced immune activity (D'Anna et al. 2017), and EBV encodes and upregulates expression of a viral IL-10 homolog (Jog et al. 2018). Furthermore, immunosuppression by coinfection with other herpesviruses is likely to increase the risk of EBV-mediated neurodegeneration.

[0010] EBV infection is associated with diseases that are associated with dementia. For example, EBV infections are considered causal to Sjogren's syndrome, lupus erythematosus, and multiple sclerosis (Casiraghi et al. 2011; Croia et al. 2014; Parks et al. 2005) and each significantly increases the risk of dementia with age (Zhao et al. 2018; Chen et al. 2019; Luczynski et al. 2019; Hou et al. 2019). In addition, because the EBV multifunctional transcriptional activator EBNA2 binds to genetic risk variants associated with these autoimmune diseases (Harley et al. 2018), EBNA2 variants could be a determinant of EBV-mediated disease expression.

### SUMMARY

[0011] Alzheimer's disease (AD) is associated with amyloid-β deposits originating from amyloid precursor protein (APP) misprocessing. APP dysfunction can have diverse destabilizing effects. The sortilin-related receptor 1 (SORLA) assists in APP transport and is reduced in the AD brain. A BLAST search identified Epstein-Barr virus (EBV) non-coding RNAs (ncRNAs) with sequence similarity to SORL1 and APP intron sequences. The invention describes single-stranded RNA or DNA oligonucleotides that prevent EBV non-coding RNAs from binding to SORL1 or APP human sequences, wherein the oligonucleotide comprises at least 7 contiguous nucleotides that may be bidirectional and at least 70% identical to any sequence from SEQ ID NOs: 3-24. The invention also describes methods of treating EBV-mediated neurodegeneration by delivering RNA or DNA encoding oligonucleotides complementary to EBV non-coding RNA, wherein the oligonucleotide comprises at least 7 contiguous nucleotides that may be bidirectional and at least 70% identical to any sequence from SEQ ID NOs: 3-24. The oligonucleotides are modified to enhance affinity and nuclease resistance. Oligonucleotides may be delivered complexed in a lipid nanoparticle or encapsulated with a liposome. The oligonucleotide, lipid nanoparticle, or liposome may be conjugated with a targeting moiety. In some embodiments, the oligonucleotides are inserted in an expression construct within a viral vector and delivered by in vivo transduction.

[0012] The invention further describes a method for treating EBV-infection by delivering a DNA or RNA construct encoding antisense oligonucleotides targeting EBV genes, wherein the oligonucleotide sequences are 70% identical to any contiguous sequences from SEQ ID NOs: 27-146. The oligonucleotide expression construct is controlled by an inducible reverse-tetracycline-transactivator transcription domain (SEQ ID NO: 148), wherein the antisense oligonucleotide construct is expressed when a patient is administered doxycycline. In some instances, multiple oligonucleotides are co-expressed using intervening internal ribosome entry sites with an integrated ATG start codon. In one embodiment, the inducible oligonucleotide construct is delivered with a construct encoding the tetracycline-transactivator (SEQ ID NO: 147) and a BCL-2 family member protein (SEQ ID NOs: 149-154) or BIRC5 (SEQ ID NO: 155). The anti-apoptotic gene is co-expressed with the transactivator on a bicistronic message using an internal ribosome entry site. Co-expression ensures anti-apoptotic expression with the transactivator. In some instances, the nucleotide sequences are modified for codon optimization. In some embodiments, the inducible oligonucleotide construct and anti-apoptotic construct are encapsulated in a lipid nanoparticle or liposome. In some embodiments, the expression constructs are inserted into a viral vector for delivery by transduction. In some embodiments, the oligonucleotides (SEQ ID NOs: 27-146) are delivered together with the anti-apoptotic proteins (SEQ ID NOs: 157-163) in liposomes.

[0013] The invention further describes a method for treating EBV-infection by delivering a CRISPR/Cas gene-editing system comprising a Cas nuclease that is programmed by multiple guide strands comprising flanking ends of EBNA1 (SEQ ID NOs: 165-166), repeat regions (SEQ ID NOs: 167-168), 5′ exon of EBNA2 (SEQ ID NOs: 169-170), and the 5′ exon of latent membrane protein-1 (SEQ ID NOs: 171-172), wherein the guide strand sequences target Cas nuclease cutting to complementary EBV sequences to eliminate the EBV genome. A Cas nuclease (SEQ ID NO: 173) and one or more guide strands are encoded in a construct controlled by an inducible reverse tetracycline-transactivator transcription domain. In some instances, the guide strand is controlled separately with a U6 promoter (SEQ ID NO: 174) or minimal cytomegalovirus promoter (SEQ ID NO: 175) and cytomegalovirus enhancer (SEQ ID NO: 176). The CRISPR/Cas construct is delivered together with a construct encoding the tetracycline-transactivator and a BCL-2 family member protein (SEQ ID NOs: 157-162) or BIRC5 (SEQ ID NO: 163) to prevent cell-mediated death. The anti-apoptotic gene is co-expressed with the transactivator by using an internal ribosome entry site. In some embodiments, the constructs are delivered complexed within a lipid nanoparticle or encapsulated in a liposome, which may be conjugated to a targeting moiety. In some embodiments, expression constructs are inserted into a viral vector for delivery by transduction. The described therapeutics could be administered by intracranial, intravenous, intradermal, subcutaneous, or intramuscular injection.

### BRIEF DESCRIPTION OF THE DRAWINGS

[0014] FIG. 1. Depicts the locations of three EBV similarity sequences (SEQ ID NO: 10) in the SORL1 gene (SEQ ID NO: 2).

[0015] FIG. 2. Depicts the location of two EBV similarity sequences (SEQ ID NO: 10) in the APP gene (SEQ ID NO: 1).

[0016] FIG. 3. Depicts the sequence (SEQ ID NO: 25) from EBV isolate H002213 containing putative EBV ncRNA complementary to SORL1 (SEQ ID NO: 2).

[0017] FIG. 4. Depicts the location of the 21-nucleotide EBV sequence similarity (SEQ ID NO: 24) in intron 32 of SORL1 (SEQ ID NO: 2).

[0018] FIG. 5. Depicts the locations of the EBV-SORL1 similarity sequence (SEQ ID NO: 24) in the EBNA-LP gene.

### DETAILED DESCRIPTION

[0019] Abnormal tau phosphorylation and neurofibrillary tangles appear decades before AD symptoms in cognitively healthy adults. Neurofibrillary tangles are first apparent in the entorhinal cortex and the adrenergic neurons of the locus coeruleus (LC) that project to the entorhinal cortex (Braak and Braak 1991; Tsartsalis et al. 2018). Neurofilament aggregation could begin when EBV infects the neurovascular unit of the transentorhinal cortex, including the endothelial cells, smooth muscle cells, pericytes, and astrocytes. EBV could spread from the vasculature to the innervating adrenergic neurons from the LC.

[0020] The adrenergic system is dysfunctional in AD patients (Gannon et al. 2015). Adrenergic neurons in the LC project axons throughout the brain to control optimal circadian homeostatic activity through the release of norepinephrine and coordinated peptides. Adrenergic neurons can control activity by regulating vascular tone. Adrenergic neuron axon terminals release norepinephrine onto smooth muscle cells in small cerebral arterials and onto pericytes in microvessels to induce vasoconstriction or vasodilation. Norepinephrine binds α-adrenergic receptors on vessels to induce vasoconstriction and binds β-adrenergic receptors to induce vasorelaxation. Age-related loss of estrogen reduces β₁- and β₃-adrenergic receptor expression resulting in reduced vasodilation (Riedel et al. 2019). Thus, the age-related loss of estrogen can reduce vasodilation in women. Accordingly, more women have higher blood pressure (Abramson et al. 2018), and vasoconstriction increases by two-fold in ovariectomized rats.

[0021] Amyloid-β deposits are a key pathological feature in AD brains. Increased amyloidogenesis in microvessels increases the expression of inflammatory cytokines, which leads to prothrombotic protein expression, such as increased tissue factor and decreased thrombin expression. Approximately 80% of AD patients have some degree of cerebral amyloid angiography (CAA) characterized by amyloid-β deposits in the vessel wall of small cortical arterials (Brenowitz et al. 2015). CAA narrows the vascular lumen and is associated with hemorrhagic bleeds, microinfarcts, and white matter pathology. Amyloid-β aggregates are also found among degenerating microcapillaries (Miyakawa 1997). The amyloid-associated vascular pathology can result in ischemic brain injury and lead to cognitive impairment.

[0022] Amyloid-β deposits may promote the coagulation factor XII pathway to activate the protease thrombin (Zamolodchikov et al. 2016). Thrombin cleaves fibrinogen molecules releasing fibrin to form an insoluble fibrous clot. AD and EBV are associated with high fibrinogen and fibrin levels (van Oijen et al. 2005; Cortes-Canteli et al. 2019; Tang et al. 2014). In addition to amyloid-β, EBV antigens exposed on the vascular surface can activate the complement system, including the C3a and C5a fragments that are unique to the AD blood proteome (Baird et al. 2015). Complement activation increases neutrophil attachment and aggregation, occluding microvessels. Occluded microvessels degenerate, resulting in local hypoxia. In a vicious cycle, hypoxia can further amplify amyloid-β processing (Bennett et al. 2000) and increase CD35 cell surface expression, which increases EBV entry efficiency (Collard et al. 1999).

[0023] Thrombosis in microvessels can cause silent inicroinfarcts. Reduced cerebral blood perfusion is an early sign of AD (Korte et al. 2020). The number of microinfarcts in brains from AD patients could be in the hundreds to thousands but are currently only visible in high field strength MRI, although infarcts smaller than 100 microns remain invisible (Reijmer et al. 2016). Similarly, EBV infection of endothelial cells in the glymphatic and meningeal lymphatic systems could block the drainage of metabolic waste.

[0024] Chronic hypoxia can cause inflammation and cell death. Inflammatory signaling activates the renin-angiotensin system, which can also increase vasoconstriction (Satou et al. 2018). Hypoxia can cause abnormal tau hyperphosphorylation, and entorhinal cortical cells are highly sensitive to hypoxia (Kirino et al. 1984). A mitigating multigenic response to hypoxia is mediated by the release of the hypoxia-inducible factor-alpha 1 (HIF-1). However, the HIF-1 response may be dysfunctional in elderly humans since HIF-1 binding to hypoxia-response element is deficient in senescent mice (Frenkel-Denkberg et al. 1999).

[0025] Sortilin-related receptor 1 (SORL1) and amyloid precursor protein (APP) gene variants influence AD risk. The SORL1 protein, SORLA, associates with APP at its C-terminal end, restricting APP location to the Golgi or cell membrane. Without SORLA, APP moves through the endosomal pathway where it is cleaved to amyloid-β by β- and γ-secretase. Norepinephrine-mediated activation of α₂-adrenergic receptors changes APP localization by disrupting SORLA and APP binding (Chen et al. 2014). Once disassociated, APP can bind activated α₂-adrenergic receptors, stabilizing the α₂-adrenergic receptor at the cell surface, thereby preventing internalization and permitting inhibitory feedback desensitization (Zhang et al. 2017). Without APP localization to activated α₂-adrenergic receptors, the α₂-adrenergic receptors bind arrestin and are internalized. The internalization of presynaptic inhibitory α₂-adrenergic receptors desensitizes feedback control, increasing norepinephrine-mediated release. Excess norepinephrine released at vascular innervation is a potent attractant for EBV infected B cells, monocytes, and macrophages expressing β₂-adrenergic receptors.

[0026] The α₁- and α₂-adrenergic receptors do not share amino acid sequence similarity in the intracellular domain that associates with APP. Thus, the loss of APP causes α₂-adrenergic receptor internalization, whereas the α₁-adrenergic receptor is unaffected. Persistent norepinephrine-mediated α₁-adrenergic receptor signaling can result in chronic vasoconstriction. The loss of norepinephrine-mediated α₂-adrenergic receptor vasoconstriction could explain the dysfunctional baroreflex in AD patients.

[0027] Astrocytes express the EBV entry receptors CD35 (CR1) and EphA2, and α₁-, α₂-, β₁- and β₂-adrenergic receptors. Norepinephrine activated β₂-adrenergic receptor is associated with increased amyloidogenesis (Ni et al. 2006). Amyloid-β reportedly acts as an allosteric ligand to enhance adrenergic signaling (Nortley et al. 2019; Zhang et al. 2020). Accordingly, in AD brains amyloid-βimmunoreactivity is found in astrocytes, not neurons (Kurt et al. 1999). Increased norepinephrine- and amyloid-β mediated α₁-adrenergic receptor signaling stimulates glutamate and ATP release from astrocytes. Activation of α₂-adrenergic receptors upregulates calcium oscillations in astrocytes, which increases the release of the inhibitory neurotransmitter GABA. GABA in turn reduces calcium oscillation in neurons (Gaidin et al. 2020). However, EBV-mediated APP disruption would decrease α₂-adrenergic receptor stabilization at the astrocyte cell surface resulting in less norepinephrine-mediated GABA release. The loss of norepinephrine-mediated astrocytic GABA release may dysregulate diurnal neuronal activity. Reduced astrocytic GABA release could explain why the astrocyte GABA transporter (BGT-1) is significantly increased in the AD hippocampus (Fuhrer et al. 2017).

[0028] Neurons and astrocytes express the ionotropic NMDA receptor (NMDAR). Amyloid-β can bind to NMDARs and activate calcium release (Li et al. 2009). In neurons, sustained intercellular calcium can induce long-term depression, leading to neurite loss (Sheng and Erturk 2014). A higher intercellular calcium concentration increases intracellular chloride. Increased intracellular chloride means that GABA-activated chloride channels result in chloride efflux and depolarization. This situation resembles development, wherein GABA from inhibitory interneurons acts as an excitatory neurotransmitter, stimulating neurite outgrowth, which could explain abnormal neurite outgrowth surrounding amyloid-β deposits in the AD brain.

[0029] The activation of α₁- and α₂-adrenergic receptors on neurons reduces the NMDAR-mediated excitatory postsynaptic potentials (EPSPs) amplitude but not the paired-pulse response (Liu et al. 2006). Amyloid-β oligomers can bind allosterically to α₂-adrenergic receptors to enhance norepinephrine-mediated G-protein activation (Zhang et al. 2020). The decreased regulator of G-protein signaling 2 (RGS2) gene expression found in AD brain tissue would potentiate decreased NMDAR current. Thus, increased norepinephrine- and amyloid-β-mediated α₁- and α₂-adrenergic receptor activation could reduce neuronal EPSP amplitudes, which could affect synaptic maintenance.

[0030] APP and SORLA are also important in regulating neuron survival. APP regulates activation and localization of the nerve growth factor (NGF) receptor, tropomyosin receptor kinase A. SORLA regulates the trafficking of the brain-derived neurotrophic factor (BDNF) receptor, tropomyosin receptor kinase B. Significant neuropathology can result from the disruption of APP and SORLA expression (Barthelson et al. 2020). Thus, targeting EBV factors disrupting SORLA and APP disruption is critical to reducing EBV-mediated AD pathology.

[0031] There is evidence that APP has anti-microbial properties (Kumar et al. 2016; Eimer et al. 2018). In HIV, APP associates with the HIV Gag polyprotein, wherein APP binding restricts HIV particles from translocating to lipid rafts, but Gag induces APP secretase cleavage for release, resulting in amyloidogenic processing (Chai et al. 2017; Hategan et al. 2019). If a herpesvirus factor interacts with APP it could have sequence similarity to APP (SEQ ID NO: 1). Using GenBank's Basic Local Alignment Search Tool (BLAST) to search for sequence similarity between SORL1 (SEQ ID NO: 2) and the Herpesviridae family identified SORL1 sequences in EBV and human herpes simplex virus 2 (HSV2) as shown in table 1 (SEQ ID NOs: 3-14). The highest sequence similarity targeted the C-terminal end of SORL1, with an Expect value of 5×10⁻¹¹⁶, matching 610/634 nucleotides. The same GenBank BLAST found 10 EBV isolates with 35-nucleotide sequence similarity to SORL1 (SEQ ID NO: 10) and an HSV2 isolate with 48-nucleotide sequence similarity to SORL1 (SEQ ID NO: 7).

TABLE 1
Human herpesvirus strains and isolates with sequence similarity to human SORL1 gene

| | HHV isolate | | Percent | Virus | Virus | SORL1 | SEQ ID | |
|---|---|---|---|---|---|---|---|---|
| HHV type-isolate | Accession | E value | identity | Position | region | region | No. | Similarity Sequence |
| HHV 4-HKHD40 | MH590409.1 | 5.00E-116 | 96 | 158635 | intergenic | intron | 3 | GTTAGTTACATATGTATACATGTGCCATGNTGGTG... |
| HHV 4-HKNPC60 | MH590571.1 | 5.00E-116 | 99 | 36456 | intergenic | intron | 4 | GCCGCAATAAACATACGTGTGCATGTGTCTTTATA... |
| HHV 4-Namalwa | AH002364.2 | 4.00E-51 | 91 | 412 | repeat | intron | 5 | CCTGTAGTCCCAGCTACTCAGGAGGCTGAGGCAG... |
| HHV 4-HKHD130 | MH590499.1 | 7.00E-16 | 87 | 37475 | intergenic | intron | 6 | AATAGGCTGNGTGCGGTGGCTCACACCTGTAATN... |
| HHV 2-2006-16150CAM | MH790658.1 | 1.00E-07 | 92 | 11357 | intergenic | intron | 7 | ACATTAGGTATATCTCCTAATGCTATCCCTCCCCC... |
| HHV 4-HKHD73 | MH590442.1 | 3.00E-07 | 83 | 95948 | intergenic | intron | 8 | GCACTCCAGCCTGGGCAACAGAGTGAGACCCTAAC... |
| HHV 4-HKHD7 | MH590376.1 | 1.00E-06 | 67 | 36674 | intergenic | intron | 9 | AATTTTGTTGATCTTTTCAAAAAACCAGCTCCTGG... |
| HHV 4-H002213 | KP968264.1 | 2.00E-04 | 97 | 159585 | A73 intron | intron | 10 | CTGCACTCCAGCCTGGGCAACAGAGCGAGACCCTG |
| HHV 4-VGO | KP968260.1 | 2.00E-04 | 97 | 159392 | A73 intron | intron | 10 | CTGCACTCCAGCCTGGGCAACAGAGCGAGACCCTG |
| HHV 4-SCI | KP968259.1 | 2.00F-04 | 97 | 15957 | A73 intron | intron | 10 | CTGCACTCCAGCCTGGGCAACAGAGCGAGACCCTG |
| HHV 4-CCH | KP968257.1 | 2.00E-04 | 97 | 159504 | A73 intron | intron | 10 | CTGCACTCCAGCCTGGGCAACAGAGCGAGACCCTG |
| HHV 4-VA | KT001102.1 | 2.00E-04 | 97 | 159547 | A73 intron | intron | 10 | CTGCACTCCAGCCTGGGCAACAGAGCGAGACCCTG |
| HHV 4-FNR | KR063345.1 | 2.00E-04 | 97 | 159600 | A73 intron | intron | 10 | CTGCACTCCAGCCTGGGCAACAGAGCGAGACCCTG |
| HHV 4-H03753A | KR063342.1 | 2.00E-04 | 97 | 159580 | A73 intron | intron | 10 | CTGCACTCCAGCCTGGGCAACAGAGCGAGACCCTG |
| HHV 4-K4123-MiEBV | KC440852.1 | 2.00E-04 | 97 | 159589 | A73 intron | intron | 10 | CTGCACTCCAGCCTGGGCAACAGAGCGAGACCCTG |
| HHV 4-K4123-Mi | KC440851.1 | 2.00E-04 | 97 | 159567 | A73 intron | intron | 10 | CTGCACTCCAGCCTGGGCAACAGAGCGAGACCCTG |
| HHV 4-B95-8 | AJ507799 | 3.00E-04 | 94 | 148162 | A73 intron | intron | 10 | CTGCAGTCCTGCCTGGCGCAACAGAGCGAGACCCTG |
| HHV 4-RPF | KR063344.1 | 6.00E-04 | 100 | 159601 | A73 intron | intron | 11 | GTCTCGCTCTGTTGCCCAGGCTGGACTGCAG |
| HHV 4-HKHD95 | MH590464.1 | 8.00E-03 | 94 | 36494 | intergenic | intron | 12 | GGCTAATTTTTTTGTATTTTTAGTAGAGATGGGG |
| HHV 4-HKHD141 | MH590510.1 | 1.30E-02 | 94 | 96579 | intergenic | intron | 13 | TTCTCCTGCCTCAGCCTCCNGAGTAGCTGGGATT |
| HHV 4-HKHD27 | MH590396.1 | 2.60E-02 | 97 | 27439 | intergenic | intron | 14 | CCATCTTGGCTCACTGCAACCTCCACCTCCC |

[0032] A BLAST search for sequence similarity between APP (SEQ ID NO: 1) and the Herpesviridae family identified some of the same similarity sequences as between SORL1 (SEQ ID NO: 2) and EBV and human herpes simplex virus-2 (HSV2) (Table 2). Some EBV isolates contain long sequences of APP intron alignment. For instance, isolates HKNPC60 and HKHD40 contain 2,486 and 2,357 nucleotides, respectively, aligned with 97% ungapped similarity to APP intron 13. The Namalwa EBV cell line contains an 82-nucleotide sequence with 93% similarity to APP intron 17.

[0033] The 35-nucleotide sequence (SEQ ID NO:10) matching APP and SORL1 is from the same EBV location (159362-159601) located in intron 3 of A73. In SORL1 and APP, the sequence targets exclusively introns on both strands. In SORL1, the antisense sequence targets intron 3 (39672) and intron 23 (126323) just 5′ from exon 24, while a sense alignment is in intron 32 (FIG. 1). Table 1 lists SEQ ID NO: 10 in plus/minus alignment, which is in the 3′ to 5′ direction or antiparallel and complementary to the human herpesvirus 4 (HHV4) sequence as shown in FIG. 3. The sequence in intron 3 is 1109-nucleotides 5′ from exon 4 (40781) and 664-nucleotides 3′ from a clinical SNP (rs11600875) at 39008 (Reynolds et al. 2013; McCarthy et al. 2012).

[0034] In APP, SEQ ID NO: 10 maps to intron 6 (183750) and intron 8 (159501) (FIG. 2). In EBV, two transcription start sites (TATA) are located 644 and 613 nucleotides 5′ of the complement, which predicts a non-coding RNA (ncRNA) of a least 644 or 613 nucleotides (FIG. 3). EBV may also transcribe an ncRNA complement from 3′ to 5′ that aligns with the intron 32 sequence and use the TATT at 160077 or 160518, which would produce at least a 502 or 943 nucleotide sequence. The 1920 EBV nucleotide sequence bracketing the complement to SEQ ID NO: 10 is encoded in SEQ ID NO: 25. A BLAST search with SEQ ID NO: 10 against Homo sapiens genomic and RNA sequences identified other RNA sequence similarities in sense, such as the Zinc Finger protein 677 mRNA and TMEM241 exon1 ncRNA.

TABLE 2
Human herpesvirus strains with sequence similarity to the human APP gene

| | HHV isolate | | Percent | Virus | Virus | APP | SEQ ID | |
|---|---|---|---|---|---|---|---|---|
| HHV type-isolate | Accession | E value | identity | Position | region | region | No. | Similarity Sequence |
| HHV 4-HKNPC60 | MH590571.1 | 1.00E-148 | 97 | 36456 | intergenic | intron | 4 | GCCGCAATAAACATACGTGTGCATGTGTCTTT... |
| HHV 4-HKHD40 | MH590409.1 | 2.00E-132 | 97 | 158638 | intergenic | intron | 15 | CAGGTTAGTTACATATGTATACATGTGCCATG... |
| HHV 4-HKHD7 | MH590376.1 | 5.00E-123 | 98 | 36670 | intergenic | intron | 16 | TATCAATTTTGTTGATCTTTTCAAAAAACCA... |
| HHV 4-Namalwa | AH002364.2 | 6.00E-51 | 89 | 412 | repeat | intron | 5 | CCTGTAGTCCCAGCTACTCAGGAGGCTGAG... |
| HHV 4-HKHD130 | MH590499.1 | 5.00E-14 | 83 | 37423 | intergenic | intron | 17 | GCGGTGGCTCACGCCTGTAATCCCAGCACTT... |
| HHV 4-HKHD73 | MH590442.1 | 6.00E-13 | 83 | 96041 | EBNA-1 | intron | 18 | ...GTCTCACTCTGTTGCCCAGGCTGGAGTGC |
| HHV 2-2006-16150C | MH790658.1 | 2.00E-07 | 92 | 11358 | intergenic | intron | 19 | CATTAGGTATATCTCCTAATGCTATCCCTCC... |
| HHV 6-HP36C6 | KY315533.2 | 8.00E-05 | 84 | 82980 | intergenic | intron | 20 | TTGTTTTAAGCCAATCTGTTTGTGATACTTTG... |
| HHV 4-HKHD141 | MH590510.1 | 1.00E-04 | 95 | 96579 | intergenic | intron | 21 | TTCTCCTGCCTCAGCCTCCNGAGTAGCTGGGA.. |
| HHV 4-HKHD141 | MH590510.1 | 1.00E-04 | 97 | 96546 | intergenic | intron | 22 | AATCCCAGCTACTCNGGAGGCTGAGGCAGGA... |
| HHV 4-HKHD95 | MH590464.1 | 0.001 | 97 | 36461 | intergenic | intron | 23 | GGCTAATTTTTTTGTATTTTTAGTAGAGATGGG.. |
| HHV 4-H002213 | KP968264.1 | 0.001 | 94 | 159586 | A73 intron | intron | 10 | CTGCACTCCAGCCTGGGCAACAGAGCGAGAC |
| HHV 4-VGO | KP968260.1 | 0.001 | 94 | 159362 | A73 intron | intron | 10 | CTGCACTCCAGCCTGGGCAACAGAGCGAGAC |
| HHV 4-SCL | KP968259.1 | 0.001 | 94 | 159573 | A73 intron | intron | 10 | CTGCACTCCAGCCTGGGCAACAGAGCGAGAC |
| HHV 4-CCH | KP968257.1 | 0.001 | 94 | 159535 | A73 intron | intron | 10 | CTGCACTCCAGCCTGGGCAACAGAGCGAGAC |
| HHV 4-VA | KT001102.1 | 0.001 | 94 | 159548 | A73 intron | intron | 10 | CTGCACTCCAGCCTGGGCAACAGAGCGAGAC |
| HHV 4-FNR | KR063345.1 | 0.001 | 94 | 159601 | A73 intron | intron | 10 | CTGCACTCCAGCCTGGGCAACAGAGCGAGAC |
| HHV 4-H03753A | KR063342.1 | 0.001 | 94 | 159581 | A73 intron | intron | 10 | CTGCACTCCAGCCTGGGCAACAGAGCGAGAC |
| HHV 4-K4123-MiEBV | KC440852.1 | 0.001 | 94 | 159590 | A73 intron | intron | 10 | CTGCACTCCAGCCTGGGCAACAGAGCGAGAC |
| HHV 4-K4123-Mi | KC440851.1 | 0.001 | 94 | 159568 | A73 intron | intron | 10 | CTGCACTCCAGCCTGGGCAACAGAGCGAGAC |
| HHV 4-RPF | KR063344.1 | 0.003 | 94 | 159631 | A73 intron | intron | 10 | CTGCAGTCCAGCCTGGGCAACAGAGCGAGAC.. |
| HHV 4-HKHD27 | MH590396.1 | 0.006 | 100 | 27469 | intergenic | intron | 24 | GGGAGGTGGAGGTTGCAGTGAGCCAAGAT |

[0035] The Virus Pathogen Database Analysis Resource (ViPR) contains 1837 complete Herpesviridae genomes. A BLAST using this database returned essentially the same EBV sequence similarity as the GenBank BLAST for SORL1 and APP. A restrictive BLAST of only EBV strains identified one 21-nucleotide sequence (SEQ ID NO: 24) with similarity to SORL1 that maps to intron 32 in SORL1 with an Expect value of 4×10⁻⁷ (FIG. 4). In the EBV isolate AJ507799.2, the 21-nucleotide sequence (SEQ ID NO: 24) locates to multiple EBNA-LP introns, 3′ of the BWRF1 repeats (FIG. 5). The 21-nucleotide sequence (SEQ ID NO: 24) has no significant alignment to APP but does have antisense alignment with the gene POU class 2 homeobox 3 gene (POU2F3). Interestingly, a KEGG pathway map shows POU2f3 functionally equivalent to Oct-1, which regulates human herpes simplex virus-1 (HSV1) immediate early gene transcription. In EBV, Oct-1 enhances BRLF1-mediated lytic replication.

[0036] An estimated 13% of herpesvirus proteins show sequence similarity to human genes, and about 54% of these sequences interact functionally with the host (Holzerlandt et al. 2002). Thus, the EBV sequences may not affect human SORL1 or APP expression. However, it is curious that only EBV, except for one alignment in HSV2, shows the same 31/35 nucleotide sequence similarity with SORL1 and APP. The functionality of the identified similarity sequences could be easily tested by measuring amyloid-β production in EBV infected endothelial, smooth muscle, and astrocytic cell lines transfected with test or scrambled control oligonucleotides.

[0037] In one embodiment, the oligonucleotides (SEQ ID NOs: 3-6; 8-24), sense or antisense or antiparallel, are delivered in vivo to block EBV-mediated SORLA and APP disruption. The EBV ncRNAs could target SORL1 and APP functional splicing elements to produce exon skipping or premature termination. For instance, the cis-natural antisense ncRNA 51A maps to intron 1 of SORL1 and reduces the expression of the dominant SORL1 splice variant A, leading to increased amyloidogenesis (Ciarlo et al. 2013). The 21-nucleotide sequence (SEQ ID NO: 24) could disrupt the splicing of the SORL1 exon coding for the last LDLR class A 11 complement repeat domain and the downstream exons that code for sites interacting with SORLA shuttling proteins. Alternatively, the EBV ncRNA binding could suppress SORL1 transcription.

[0038] Neurons from AD brains show abnormal expression of cell cycle entry proteins cyclins-D and —B and increased hyperploidy (Yang et al. 2003; Frade and López-Sánchez 2017). Cell cycle entry is abnormal for postmitotic neurons and is linked to synaptic dysfunction and neuron death (Herrup 2010; Barrio-Alonso et al. 2018). EBV expresses high levels of two short ncRNA molecules, EBER1 and EBER2. EBER expression induces IL-6 mediated activation of signal transducers and activators of transcription 3 (STAT3). STAT3 activation decreases the expression of cyclin-dependent kinase inhibitors p21 and p27, which releases cyclin-dependent kinases 2 and 4 (CDK4 and CDK2) inhibition, allowing cyclins to promote GUS transition (Yin et al. 2019; Yajima et al. 2005). CDK4 activation induces cell death by hyperphosphorylation of the pRb family member p130. Phosphorylated p130 binds chromatin modifiers Suv39H1 and HDAC1, releasing the transcription factor E2F4, which binds transcription factors B and C-Myb promoters to initiate transcription. Transcription factors B and C-Myb bind the promoter of the proapoptotic BH3-containing Bim to initiate transcription. Bim activates BAX/BAK, which forms multimeric pores in the mitochondrial membrane and releases cytochrome c. Cytochrome c binds the protein 14-3-3ε to release its inhibition over the apoptotic protease activating factor-1, allowing apoptosome formation and apoptosis-inducing caspase 9/3 activation (Greene et al. 2007). Accordingly, the upregulation of BIM expression in the AD brain compared to healthy control brain could in part be caused by EBER1 (Biswas et al. 2007).

[0039] EBER1 and EBER2 are found in extracellular vesicles adjacent to nasopharyngeal tumors (Cheng et al. 2019) and EBER1 was found secreted bound to the lupus La protein (Iwakiri et al. 2009). EBER1 was also found bound to L22 ribosomal protein (EBER-associated protein) in uninfected cells (Toczyski et al. 1994). The entry of EBER1 into uninfected neurons could induce cyclin-dependent kinase-mediated apoptosis. Moreover, EBERs binding to TLR3 in neurons can cause irreversible growth cone collapse and inhibit neurite outgrowth. Blocking extracellular EBER1 passage to neurons could prevent neuron dysfunction. The EBERs could also produce inflammation in microvessels or lymphatic vessels. Thus, in one embodiment, the oligonucleotides antisense to EBER1 (SEQ ID NOs: 27-36) and EBER2 (SEQ ID NOs: 37-46) are delivered in vivo to block EBER function.

[0040] The oligonucleotides described in SEQ ID NOs: 3-24 function by binding to complementary sequences to block DNA transcription by triplex-forming oligonucleotide, splicing, or ncRNA function. In some cases, the delivered oligonucleotide SEQ ID NOs: 3-6; 8-24 is antisense or complementary and antiparallel to the EBV ncRNA sequence and functions as an RNA or ribonucleoprotein sponge.

[0041] In another embodiment, locked-nucleic acid-modified nucleotides are included within the oligonucleotide. In some instances, nucleotides are modified with a 2′-O-methyl, 2′-O-Methoxyethyl, 2′-fluorine at 2′-ribose (OH), and 2′-fluoroarabinonucleic acid to increase annealing affinity to complementary RNA. A locked nucleotide contains a methylene bridge between the 2′ and 4′ positions of the ribose and increases binding affinity. A phosphorothioate or amide nucleotide linkage increases RNase resistance.

[0042] In some embodiments, the oligonucleotides are complexed with nanoparticles or contained within liposomes. In some embodiments, a targeting moiety is conjugated directly to the oligonucleotides with SEQ ID NOs: 3-24, lipid nanoparticles, or liposomes. A targeting moiety increases the cellular uptake by the intended target cell and therefore, therapeutic efficacy. In some embodiments, CD21 expressing cells are targeted by conjugation with an antibody or single-chain antigen-binding variable domain fragment (FAB). Unlike most viral entry receptors, CD21 expression is stable or even upregulated after EBV infection, making CD21 an ideal target for delivering an EBV therapeutic (Ogembo et al. 2013). In some embodiments, CD20 expressing B cells are targeted by conjugation with an antibody or single-chain antigen-binding variable domain fragment (FAB). In some embodiments, only EBV infected cells are targeted by using an antibody or a single-chain antigen-binding variable domain fragment with affinity to the extracellular portion of LMP2A/B, or BILF1 protein expressed on the infected cell surface. U.S. Pat. Nos. 10,800,848; 10,787,519; 10,550,188; 10,487,149 disclose compositions comprising an antibody or binding fragment conjugated to polynucleic acid molecules. In some embodiments, oligonucleotides target αᵥβ₃, or αᵥβ₆ on the cell surface by conjugating the oligonucleotide with the high-affinity peptides such as cRDGyK (Tian et al. 2018; Tabata et al. 2008). In some instances, oligonucleotides are labeled with azide using 3-azidoproprionic acid and reacted with antibodies functionalized with a dibenzocyclooctyne (DBCO) click group (Wiener et al. 2020).

[0043] In another embodiment, the cell-penetrating peptide from HIV-Tat (GRKKRRQRRRPPQ) (SEQ ID NO: 26) or similar cationic penetrating peptide is fused to oligonucleotides, lipid nanoparticles, or liposomes to enhance delivery (Astriab-Fisher et al. 2002; Farrell et al. 2004). For example, a cell-penetrating peptide can be a bipartite amphipathic peptide, such as MPG, which is derived from the fusion peptide domain of HIV-1 gp4l and the NLS of SV40 large T antigen (Simeoni et al. 2003). In another embodiment, the oligonucleotides are inserted in an expression construct within a viral vector and delivered by in vivo transduction. The viral vector may be an adreno-associated virus or lentivirus (Körbelin et al. 2016).

[0044] Blocking EBV-mediated SORLA and APP dysfunction can prevent vasoconstriction, dysfunctional baroreflex, increased thrombosis, and complement-mediated lysis of microvessel, glymphatic, and meningeal lymphatic endothelial cells, decreased NGF and BDNF signaling, and dysfunctional calcium signaling. Blocking EBER ribonucleoproteins may prevent non-cell-autonomous effects in non-infected cells. However, EBV infection could still cause catastrophic neuron degeneration if EBV infected astrocytes fail to support neurons. For instance, astrocytes provide glucose, water, and electrolytes, a blood-brain barrier, neurovascular coupling, and prevent excessive glutamate and K⁺ ions accumulation. Thus, preventing AD may require eradicating EBV infection.

[0045] EBV lytic replication can be inhibited by the antivirals, acyclovir and penciclovir, and their more bioavailable analogs, valaciclovir and famciclovir, respectively. However, EBV factors (EBNA1-4, LMP1, and EBERs) are expressed during different stages of latency and they alter the expression of thousands of genes. Thus, EBV-mediated disease cannot be managed by the current antivirals, which only prevent lytic replication.

[0046] EBV genomes can be eliminated by targeting EBNA1 (Noh et al. 2016; van Diemen et al. 2016). Wang and Quake report that targeting multiple EBV proteins can efficiently eliminate EBV genomes (Wang and Quake 2014). However, eliminating EBV genomes results in the loss of multiple EBV factors that prevent cell-mediated apoptosis, thus, permitting apoptosis execution. The apoptosis of vascular cells or astrocytes could cause massive hemorrhaging or catastrophic neuron death, respectively. Cell-mediated apoptosis can be prevented by increasing the expression of anti-apoptotic factors.

TABLE 3
List of EBV targets for viral eradication by antisense
oligonucleotides

| SEQ ID | | |
|---|---|---|
| NO | Target | Details |
| 27-36 | EBER1 | Secreted and blocks PKR |
| 37-46 | EBER2 | Binds cellular PAX5 to regulate EBV |
| | | transcription |
| 47-56 | EBNA1 | Activates intracellular immunity and blocks |
| | | episome maintenance |
| 57-66 | EBNA2 | Blocks cellular transactivator |
| 67-76 | LMP1 | Prevents NF-kB activation |
| 77-86 | RZLF1 | Prevent viral gene expression required for |
| | | lytic replication |
| 87-96 | BPLF1 | Major cellular protein binding hub |
| 97-106 | BFLF2 | Major cellular protein binding hub |
| 107-116 | BALF4 | Major cellular protein binding hub |
| 117-126 | SM | Prevent binding and inactivation of SP100 |
| 127-136 | BRRF1 | Major cellular protein binding hub |
| 137-146 | BVRF1 | Major cellular protein binding hub |

[0047] Efficient EBV genome elimination requires targeting multiple EBV factors simultaneously in the same cell (Table 3). Integral to eliminating EBV is to prevent EBV from blocking intrinsic immunity factors, including the promyelocytic leukemia protein nuclear body components (PML-NBs) or nuclear domain 10 (ND10). EBNA1 is a critical protein involved in EBV episome maintenance, lytic replication, and preventing cellular immunity. EBNA1 and SM inhibit antiviral PML-NBs activity. Blocking EBNA1 in EBV-lymphoma cells induces EBV genome loss (Noh et al. 2016). Interferon signaling is required to mobilize and intensify PML-NB antiviral activity. Interferon signaling is muted by LMP1 and by EBER1 binding to the double-stranded RNA-dependent protein kinase (PKR).

[0048] The EBV BZLF1 is expressed as an immediate-early gene and functions as the lytic switch transactivator to initiate regulatory gene expression required for lytic replication. The EBV protein LMP1 will be silenced to prevent autophagy activation and the unfolded protein response, which phosphorylates the eukaryotic translation initiation factor 2 alpha (eIF2α) to block protein synthesis. The EBV protein EBNA2 is a multifunctional transcriptional activator altering the expression of thousands of genes. Similarly, BPLF1, BFLF2, BALF4, BVRF1, and BRRF1 are targets because they are major EBV protein interaction hubs with human genes (Calderwood et al. 2007). Silencing these EBV genes will restore cellular homeostasis (Toyama et al. 2018).

[0049] In another embodiment, the antisense oligonucleotides from any combination of SEQ ID NOs: 27-146 are delivered in an expression construct under the control of a reverse inducible tetracycline-transactivator transcription domain (SEQ ID NO: 147). The oligonucleotide construct is delivered together with a construct encoding the transactivator gene (SEQ ID NO: 148) and a BCL-2 family member, such as BCL-2, BCL-XL, MCL-1, BFL-1, BCL-W, and BCL2L10 (SEQ ID NOs: 149-154) and/or survivin (BIRC5) (SEQ ID NO: 155). The transactivator and anti-apoptotic gene are co-expressed using an internal ribosome entry site (SEQ ID NO: 156), allowing the translation of two products. BCL-2 family members contain a pattern of BH1-4 sequences that bind and neutralize the ability of pro-apoptotic BH3-containing BIM, BAD, and BID to bind to pore-forming BAX/BAK at the mitochondrial outer membrane. The protein survivin functions by inhibiting caspase activation. The inducible oligonucleotide expression delays EBV targeting until anti-apoptotic protein levels are ramped up. The co-expression construct is a safeguard to ensure that the transactivator is only expressed with anti-apoptotic protein expression.

[0050] In another embodiment, a combination of antisense oligonucleotides from SEQ ID NOs: 27-146 is delivered together with BCL-2-member proteins (SEQ ID NOs: 157-162), or and/or survivin protein (SEQ ID NO: 163).

[0051] The oligonucleotides function by blocking mRNA translation through RNase-H cleavage, steric hindrance, or by direct RNA-induced silencing complex cleavage. Antisense oligonucleotides are preferred over short interfering RNA because the EBV miRNA-BART6-5p targets Dicer mRNA. The sequences in SEQ ID NOs: 27-146 are derived from a prototypical isolate (LN827555 or AJ507799). Patients can harbor different strains and multiples thereof, altering oligonucleotide target complement sequences. Thus, oligonucleotide target sequences were chosen from conserved regions across isolates.

[0052] In some instances, the constructs are DNA plasmids or linearized. In some instances, the gene coding sequences use codon optimization for increased translation efficiency. Online tools are available free for sequence codon optimization (Fuglsang 2003). In some instances, the cDNA contains an artificial or natural intron to increase transcription efficiency (SEQ ID NO: 164).

[0053] EBV infection can also be eliminated by targeting EBV genes with TALENS, meganucleases, zinc finger nucleases, or a Clustered Regularly Interspaced Short Palindromic Repeats (CRISPR)/CRISPR-associated nuclease (Cas) system. A designer meganuclease significantly reduced human herpes simplex 1 infection in the superior cervical ganglia and trigeminal ganglia of mice (Aubert et al. 2020; Aubert et al. 2016). Aubert et al. found meganucleases more efficient than CRISPR/Cas9 editing, however other studies show CRISPR/Cas gene editing is more successful (Park et al. 2019).

[0054] In vitro CRISPR/Cas editing methods for eliminating EBV infection have been described previously (Wang and Quake 2014; Noh et al. 2016; van Diemen et al. 2016; Yuen et al. 2015). Wang and Quake reported that targeting multiple EBV latency expressed proteins with complementary guide strands increased elimination efficacy. As discussed earlier, EBV genome elimination will cause cell-mediated apoptosis. Therefore, preventing cell-mediated apoptosis in critical cells is necessary for successful EBV infection treatment.

[0055] In some embodiments, a CRISPR/Cas gene-editing system is controlled by an inducible reverse tetracycline-transactivator (SEQ ID NO: 147), wherein guide strands target genes encoding one or more EBV proteins. In some instances, targets comprise the flanking ends of EBNA-1 (SEQ ID NOs: 165-166), repeat regions (SEQ ID NOs: 167-168), 5′ exon of EBNA-2 (SEQ ID NOs: 169-170), and 5′ exon of latent membrane protein-1 (SEQ ID NOs: 171-172). In some instances, the guide strands and Cas nuclease (SEQ ID NO: 173) reside on the same construct, with expression under the control of the tetracycline-transactivator transcription domain (SEQ ID NO: 148). In some instances, an inducible-transactivator controls Cas transcription. In some instances, the human U6 promoter (SEQ ID NO: 174) or minimal cytomegalovirus promoter (SEQ ID NO: 175) with enhancer (SEQ ID NO: 176) regulates guide strand transcription. In some instances, a Cas9 variant is used. In some instances, the Cas nuclease contains a nuclear localization signal (SEQ ID NO: 177) at the N- or C-termini. The CRISPR/Cas system is delivered encapsulated together with a construct for co-expression of the reverse tetracycline-transactivator and cDNA for BCL-2 family members BCL-2, BCL-XL, MCL-1, BFL-1, BCL-W, and BCL2L10 (SEQ ID NOs: 149-154) and/or survivin (BIRC5) (SEQ ID NO: 155). In some instances, transcription of the transactivator and anti-apoptotic construct is regulated by sequences comprising the human U6 promoter (SEQ ID NO: 174), proprietary Pmax promoter, minimal cytomegalovirus promoter (SEQ ID NO: 175), and enhancer (SEQ ID NO: 176). In some instances, the constructs are within plasmids. In some instances, the constructs are linearized. In some instances, the cDNA contains an artificial or natural intron to increase transcription efficiency. In some instances, the gene coding sequences use codon optimization.

[0056] In some embodiments, the CRISPR/Cas and guide strand construct are delivered with BCL-2 family member protein (SEQ ID NOs: 157-162) and/or survivin protein (SEQ ID NO: 163).

[0057] Non-limiting examples of suitable Cas proteins which may be used in accordance with the present teachings include Cas3, Cas4, Cas5, Cas5e (or CasD), Cas6, Cas6e, Cas6f, Cas7, Cas8a1, Cas8a2, Cas8b, Cas8c, Cas9, Cas 10, Cas1 Od, CasF, CasG, CasH, Csy1, Csy2, Csy3, Cse1 (or CasA), Cse2 (or CasB), Cse3 (or CasE), Cse4 (or CasC), Csc1, Csc2, Csa5, Csn2, Csm2, Csm3, Csm4, Csm5, Csm6, Cmr1, Cmr3, Cmr4, Cmr5, Cmr6, Csb1, Csb2, Csb3, Csxl7, Csxl4, CsxlO, Csxl6, CsaX, Csx3, Cszl, Csxl5, Csf1, Csf2, Csf3, Csf4, and Cul966. Cas9 is a monomeric DNA nuclease guided to a DNA target sequence adjacent to the guide strand's protospacer adjacent motif (PAM). The Cas9 protein comprises two nuclease domains homologous to RuvC and HNH nucleases. The HNH nuclease domain cleaves the complementary DNA strand whereas the RuvC-like domain cleaves the non-complementary strand and, as a result, a blunt cut is introduced in the target DNA. The methods for CRISPR/Cas gene editing are constantly being improved and have moved beyond ex vivo genetic modification. A clinical trial (NCT04601051) is currently testing in vivo CRISP/Cas gene editing delivered in lipid nanoparticles for Hereditary Transthyretin Amyloidosis with Polyneuropathy. U.S. Pat. No. 10,760,075 describes using CRISP/Cas to treat a microbial infection along with immunotherapy treatment. Herein gene expression must be introduced in combination with CRISP/Cas gene editing to prevent cell death of critical cells.

[0058] Solid lipids are complexed with the RNA or DNA payload in lipid nanoparticles. Liposomes are unilamellar or multilamellar vesicles that have a lipophilic membrane and an aqueous interior containing the composition to be delivered. While the production and lipid arrangement in nanoparticles and liposomes differ, they are typically made from the same cationic compositions.

[0059] Advantages of liposomes include: liposomes obtained from natural phospholipids are biocompatible and biodegradable; liposomes can incorporate a wide range of water and lipid-soluble drugs; liposomes protect encapsulated drugs in their internal compartments from metabolism and degradation (Lieberman et al. 1989). Important considerations in the preparation of liposome formulations are the lipid surface charge, vesicle size, and the aqueous volume of the liposomes.

[0060] Liposomes that are pH-sensitive or negatively charged, entrap RNA rather than complex with it. Since the RNA and the lipid are similarly charged, repulsion rather than complex formation occurs. Nevertheless, some RNA is entrapped within the aqueous interior of these liposomes. pH-sensitive liposomes have been used to deliver mRNA encoding the thymidine kinase gene to cell monolayers in culture. Expression of the exogenous gene was detected in the target cells (Zhou and Huang 1992).

[0061] Because liposomal membranes are structurally similar to biological membranes, liposomes merge with the cellular membranes and empty contents into the cell. Liposomes fall into two broad classes. Cationic liposomes are positively charged liposomes that interact with the negatively charged DNA molecules to form a stable complex. The positively charged DNA/liposome complex binds to negatively charged cell surface and is internalized in an endosome. Liposomes within endosomes can be enzymatically degraded as the endosome matures and merges with lysosomes. Thus, endosomal digestion is a major barrier for in vivo intracellular drug delivery. To avoid this, the liposome must rupture the endosomal membrane to release contents into the cell. Including cationic or ionizable groups, such as amines, on the liposome surface is one way to accomplish endosomal escape. The protonatable amine group becomes cationic as the pH decreases. Cationic groups neutralize the negative change between the endosomal membrane and liposome destabilizing the membrane and result in liposomal contents released into the cell cytoplasm (Martens et al. 2014).

[0062] One major type of liposomal composition includes phospholipids other than naturally-derived phosphatidylcholine. Neutral liposome compositions, for example, can be formed from dimyristoyl phosphatidylcholine (DMPC) or dipalmitoyl phosphatidylcholine (DPPC). Anionic liposome compositions generally are formed from dimyristoyl phosphatidylglycerol, while anionic fusogenic liposomes are formed primarily from dioleoyl phosphatidylethanolamine (DOPE). Another type of liposomal composition is formed from phosphatidylcholine such as soybean phosphatidylcholine and egg phosphatidylcholine. Another type is formed from mixtures of phospholipid and/or phosphatidylcholine and/or cholesterol.

[0063] Liposomes also include “sterically stabilized” liposomes, a term which, as used herein, refers to liposomes comprising one or more specialized lipids that, when incorporated into liposomes, result in enhanced circulation lifetimes relative to liposomes lacking such specialized lipids. Examples of sterically stabilized liposomes are those in which part of the vesicle-forming lipid portion of the liposome (A) comprises one or more glycolipids, such as monosialoganglioside or (B) is derivatized with one or more hydrophilic polymers, such as a polyethylene glycol (PEG) moiety. Sterically stabilized liposomes containing gangliosides, sphingomyelin, or PEG-derivatized lipids have enhanced circulation half-life from reduced reticuloendothelial uptake (Allen and Chonn 1987).

[0064] Many liposomes comprising lipids derivatized with one or more hydrophilic polymers, and methods of preparation thereof, are known in the art (Moncalvo et al. 2020). Synthetic phospholipids modified by the attachment of carboxylic groups of polyalkylene glycols (e.g., PEG) are described by Sears (U.S. Pat. Nos. 4,426,330 and 4,534,899). Klibanov et al. described experiments demonstrating that liposomes comprising phosphatidylethanolamine (PE) derivatized with PEG or PEG stearate have significant increases in blood circulation half-lives (Klibanov et al. 1990). Blume et al. extended such observations to other PEG-derivatized phospholipids, e.g., DSPE-PEG, formed from the combination of distearoylphosphatidylethanolamine (DSPE) and PEG (Blume and Cevc 1990). Liposomes having covalently bound PEG moieties on their external surface are described in European Patent No. EP 0 445 131 B1 and WO 90/04384. Liposome compositions containing 1-20 mole percent of PE derivatized with PEG, and methods of use thereof, are described in U.S. Pat. No. 5,013,556.

[0065] Lipid nanoparticles and liposomes are useful for the delivery of active ingredients to the site of action. Delivering a combination of therapeutics in one package can ensure that each cell receives the necessary compositions in correct proportions. Targeting the liposome delivery to a specific cell surface with targeting moieties can improve delivery. For instance, antibody targeting liposomes increase delivery efficiency (Wang and Huang 1987b; Wang and Huang 1987a). Meissner et al. treated mice with CD20 targeting liposomes comprising BCL-2 antisense oligonucleotide to eliminate the B-cell lymphoma tumors in the mice (Meissner et al. 2015). Increased delivery efficiency increases therapeutic efficacy while minimizing side effects.

[0066] U.S. Pat. Nos. 5,540,935 and 5,556,948 describes PEG-containing liposomes derivatized with functional moieties on their surface. In some embodiments, liposomes are conjugated with any of the same functional targeting ligands described above in paragraph [0042] for direct oligonucleotide conjugation. In some instances, endothelial cells expressing glucose transporter-1 are targeted with glucose conjugated liposomes (Min et al. 2020). Techniques for conjugating ligands to the liposome surface, both covalently and non-covalently, are known art. In some instances, the targeting moiety is conjugated to the liposome using an amide bond formation, thiol bond formation, hydrazone bond formation, ester bond formation, or an avidin-biotin bond (Ero\check{g}lu and İbrahim 2020).

[0067] WO 96/40062 discloses methods for encapsulating high molecular weight nucleic acids in liposomes. U.S. Pat. No. 5,264,221 discloses protein-bonded liposomes containing dsRNA. U.S. Pat. No. 5,665,710 describes methods of encapsulating oligodeoxynucleotides in liposomes. WO 97/04787 discloses liposomes comprising dsRNAs targeted to the Raf gene. A neutral liposomal formulation containing antisense oligonucleotide complementary to growth factor receptor-bound protein 2 (Grb2) mRNA is currently being tested in clinical trials for multiple cancer types. Patisiran (Onpattro) is a treatment approved for familial amyloid polyneuropathy that delivers double-stranded RNA in a liposome.

[0068] In another embodiment, the constructs are delivered in a naked plasmid or polynucleotide. Neovasculgen is a plasmid encoding VEGF for the treatment of peripheral artery disease. Pegaptanib (Macugen) is a polynucleotide encoding VEFG for the treatment of macular degeneration. In another embodiment, the constructs are delivered using a viral vector. Viral vectors are made safe by deleting virulence factors. Viral vectors may be necessary for high transduction efficiency or expression. High expression of BCL-2 family member proteins may be necessary to prevent apoptosis. Gene therapy treatments using adenovirus and lentiviral vectors are the leading platforms. Zolgensma (onasemnogene) is an incompetent recombinant adenovirus 9 that delivers the SMN gene by intravenous injection. The human immunodeficiency type 1 lentivirus vector is used to transform human erythroid cells ex vivo with the β-globin gene for sickle cell treatment (Uchida et al. 2019). The persistence of viral vectors could be risky. However, a modified lentivirus vector can self-inactivate, preventing viral RNA replication (Zufferey et al. 1998).

[0069] The described therapeutics can be delivered by intravenous, intradermal, subcutaneous, intramuscular, or intracranial injection. However, therapeutic delivery could temporarily increase a local inflammatory response. To prevent therapy-related thrombosis, an oral thrombin inhibitor, such as Dabigatran can be administered to patients before treatment (Cortes-Canteli et al. 2019). Patients are administered doxycycline by oral route to induce the expression of constructs containing tetracycline-transactivator domains.

### Definitions

[0070] The term plus means sense or coding strand. The term minus means antisense or complementary to the coding strand. The term “antiparallel” means in the opposite direction or 3′ to 5′ direction, while forward is the 5′ to 3′ direction or left to right. Herein, the definition of an isolate is a virus derived from an individual, it may or may not constitute a separate strain. A moiety can be a ligand, peptide, oligonucleotide, antibody, antibody fragment, glucose, or any targeting molecule that connects the oligonucleotide to a cell surface biomarker or connects the liposome to a cell surface biomarker. A recombinant virus is defined as a virus that is modified from its original sequence. The abbreviation ncRNA stands for non-coding RNA. Non-coding RNA is RNA that is not processed into mRNA for protein-coding and may be intergenic or intragenic. The term incompetent means that the virus cannot replicate. The term liposome generally means a vesicle composed of amphiphilic lipids arranged in a spherical shape with an aqueous core. The term lipid nanoparticle generally means the payload is complexed with a solid cationic lipid. Micelles and liposomes can coexist in some lipid nanoparticles formulations. An expression construct is a double-stranded DNA nucleotide sequence that includes sequences for transcript replication. An expression construct may be circularized, as in a plasmid, or linear.

### REFERENCES

[0071] Abramson, B. L.; Srivaratharajah, K.; Davis, L. L.; Parapid (2018): Women and Hypertension: Beyond the 2017 Guideline for Prevention, Detection, Evaluation, and Management of High Blood Pressure in Adults. Available online at https://www.acc.org/latest-in-cardiology/articles/2018/07/27/09/02/women-and-hypertension.
[0072] Allen, T. M.; Chonn, A. (1987): Large unilamellar liposomes with low uptake into the reticuloendothelial system. In FEBS letters 223 (1), pp. 42-46. DOI: 10.1016/0014-5793(87)80506-9.
[0073] Astriab-Fisher, Anna; Sergueev, Dimitri. Fisher, Michael; Shaw, Barbara Ramsay; Juliano, R. L. (2002): Conjugates of antisense oligonucleotides with the Tat and antennapedia cell-penetrating peptides. Effects on cellular uptake, binding to target sequences, and biologic actions. In Pharmaceutical research 19 (6), pp. 744-754. DOI: 10.1023/a:1016136328329.
[0074] Aubert, Martine; Madden, Emily A.; Loprieno, Michelle; DeSilva Feelixge, Harshana S.; Stensland, Laurence; Huang, Meei-Li et al. (2016): In vivo disruption of latent HSV by designer endonuclease therapy. In JCI insight 1 (14). DOI: 10.1172/jci.insight.88468.
[0075] Aubert, Martine; Strongin, Daniel E.; Roychoudhury, Pavitra; Loprieno, Michelle A.; Haick, Anoria K.; Klouser, Lindsay M. et al. (2020): Gene editing and elimination of latent herpes simplex virus in vivo. In Nature communications 11 (1), p. 4148. DOI: 10.1038/s41467-020-17936-5.
[0076] Baird, Alison L.; Westwood, Sarah; Lovestone, Simon (2015): Blood-Based Proteomic Biomarkers of Alzheimer's Disease Pathology. In Frontiers in neurology 6, p. 236. DOI: 10.3389/fneur.2015.00236.
[0077] Barrio-Alonso, E.; Hernandez-Vivanco, A.; Walton, C. C.; Perea, G.; Frade, J. M. (2018): Cell cycle reentry triggers hyperploidization and synaptic dysfunction followed by delayed cell death in differentiated cortical neurons. In Scientific reports 8 (1), p. 14316. DOI: 10.1038/s41598-018-32708-4.
[0078] Barthelson, Karissa Newman, Morgan; Lardelli, Michael (2020): Sorting Out the Role of the Sortilin-Related Receptor 1 in Alzheimer's Disease. In Journal of Alzheimer's disease reports 4 (1), pp. 123-140. DOI: 10.3233/ADR-200177.
[0079] Bennett, S. A. L; Pappas, B. A; Stevens, W. D; Davidson. C. M; Fortin. T.; Chen, J. (2000): Cleavage of amyloid precursor protein elicited by chronic cerebral hypoperfusion. In Neurobiology of aging 21 (2). pp. 207-214. DOI: 10.1016/S0197-4580(00)00131-7.
[0080] Biswas, Subhas C.; Shi, Yijie; Vonsattel, Jean-Paul G.; Leung, Conrad L.; Troy, Carol M.; Greene, Lloyd A. (2007): Bim is elevated in Alzheimer's disease neurons and is required for beta-amyloid-induced neuronal apoptosis. In The Journal of neuroscience: the official journal of the Society for Neuroscience 27 (4), pp. 893-900. DOI: 10.1523/JNEUROSCI.3524-06.2007.
[0081] Blume, Gabriele; Cevc, Gregor (1990): Liposomes for the sustained drug release in vivo. In Biochimica et Biophysica Acta (BBA)—Biomembranes 1029 (1), pp. 91-97. DOI: 10.1016/0005-2736(90)90440-Y.
[0082] Braak, H.; Braak, E. (1991): Neuropathological staging of Alzheimer-related changes. In Acta Neuropathol 82 (4). pp. 239-259. DOI: 10.1007/BF00308809.
[0083] Brenowitz, Willa D.; Nelson, Peter T.; Besser, Lilah M.; Heller, Katherine B.; Kukull, Walter A. (2015): Cerebral amyloid angiopathy and its co-occurrence with Alzheimer's disease and other cerebrovascular neuropathologic changes. In Neurobiology of aging 36 (10). pp. 2702-2708. DOI: 10.1016/j.neurobiolaging.2015.06.028.
[0084] Calderwood, Michael A.; Venkatesan, Kavitha; Xing, Li; Chase, Michael R.; Vazquez, Alexei; Holthaus, Amy M. et al. (2007): Epstein-Barr virus and virus human protein interaction maps. In Proceedings of the National Academy of Sciences 104 (18), pp. 7606-7611. DOI: 10.1073/pnas.0702332104.
[0085] Casiraghi, Costanza; Dorovini-Zis, Katerina; Honitz, Marc S. (2011): Epstein-Barr virus infection of human brain microvessel endothelial cells. A novel role in multiple sclerosis. In Journal of neuroimmunology 230 (1-2), pp. 173-177. DOI: 10.1016/j.jneuroim.2010.08.003.
[0086] Chai, Qingqing; Jovasevic, Vladimir, Malikov, Viacheslav; Sabo, Yosef; Morham, Scott; Walsh, Derek; Naghavi, Mojgan H. (2017): HIV-1 counteracts an innate restriction by amyloid precursor protein resulting in neurodegeneration. In Nature communications 8 (1), p. 1522. DOI: 10.1038/s41467-017-01795-8.
[0087] Chandra, Avinash (2015): Role of amyloid from a multiple sclerosis perspective. A literature review. In Neuroimmunomodulation 22 (6), pp. 343-346. DOI: 10.1159/000375309.
[0088] Chen, Huang-Hsi; Pemg, Wuu-Tsun; Chiou, Jeng-Yuan; Wang, Yu-Hsun; Huang, Jing-Yang; Wei, James Cheng-Chung (2019): Risk of dementia among patients with Sjogren's syndrome. A nationwide population-based cohort study in Taiwan. In Seminars in arthritis and rheumatism 48 (5). pp. 895-899. DOI: 10.1016/j.semarthrit.2018.06.007.
[0089] Chen, Yunjia; Peng, Yin; Che, Pulin; Gannon, Mary; Liu, Yin; Li, Ling et al. (2014): α(2A) adrenergic receptor promotes amyloidogenesis through disrupting APP-SorLA interaction. In Proceedings of the National Academy of Sciences of the United States of America 111 (48), pp. 17296-17301. DOI: 10.1073/pnas.1409513111.
[0090] Cheng, Shiyue; Li, Zhi; He, Junju; Fu, Shujun; Duan, Yumei; Zhou, Qin et al. (2019): Epstein-Barr virus noncoding RNAs from the extracellular vesicles of nasopharyngeal carcinoma (NPC) cells promote angiogenesis via TLR3/RIG-I-mediated VCAM-1 expression. In Biochimica et biophysica acta. Molecular basis of disease 1865 (6), pp. 1201-1213. DOI: 10.1016/j.bbadis.2019.01.015.
[0091] Chung, Sun Ju; Kim, Mi-Jung; Kim, Young Jin Kim, Juyeon; You, Sooyeoun; Jang, Eun Hye et al. (2014): CR1, ABCA7, and APOE genes affect the features of cognitive impairment in Alzheimer's disease. In Journal of the neurological sciences 339 (1-2), pp. 91-96. DOI: 10.1016/j.jns.2014.01.029.
[0092] Ciaramella, Antonio; Salani, Francesca; Bizzoni, Federica; Orfei, Maria Donata; Caltagirone, Carlo; Spalletta, Gianfranco; Bossu, Paola (2016): Myeloid dendritic cells are decreased in peripheral blood of Alzheimer's disease patients in association with disease progression and severity of depressive symptoms. In J Neuroinflammation 13 (1), p. 383. DOI: 10.1186/s12974-016-0483-0.
[0093] Ciarlo, Eleonora; Massone, Sara; Penna, Ilaria Nizzari, Mario; Gigoni, Arianna; Dieci, Giorgio et al. (2013): An intronic ncRNA-dependent regulation of SORL1 expression affecting Aβ formation is upregulated in post-mortem Alzheimer's disease brain samples. In Disease models & mechanisms 6 (2), pp. 424-433. DOI: 10.1242/dmm.009761.
[0094] Collard, C. D.; Bukusoglu, C.; Agah, A.; Colgan, S. P.; Reenstra, W. R.; Morgan, B. P.; Stahl, G. L (1999): Hypoxia-induced expression of complement receptor type 1 (CR1, CD35) in human vascular endothelial cells. In The American journal of physiology 276 (2), C450-8. DOI: 10.1152/ajpcell.1999.276.2.C450.
[0095] Cortes-Canteli, Marta; Kruyer, Anna; Femandez-Nueda, Irene; Marcos-Diaz, Ana; Ceron, Carlos; Richards, Allison T. et al. (2019): Long-Term Dabigatran Treatment Delays Alzheimer's Disease Pathogenesis in the TgCRND8 Mouse Model. In Journal of the American College of Cardiology 74 (15), pp. 1910-1923. DOI: 10.1016/j.jacc.2019.07.081.
[0096] Croia, Cristina; Astorri, Elisa; Murray-Brown, William; Willis, Amanda; Brokstad, Karl A.; Sutcliffe, Nurhan et al. (2014): Implication of Epstein-Barr virus infection in disease-specific autoreactive B cell activation in ectopic lymphoid structures of Sjögren's syndrome. In Arthritis & rheumatology (Hoboken, N.J.) 66 (9), pp. 2545-2557. DOI: 10.1002/art.38726.
[0097] D′Anna, Lucio; Abu-Rumeileh, Samir; Fabris, Martina; Pistis, Cinzia; Baldi, Antonio; Sanvilli, Nova et al. (2017): Serum Interleukin-10 Levels Correlate with Cerebrospinal Fluid Amyloid Beta Deposition in Alzheimer Disease Patients. In Neuro-degenerative diseases 17 (4-5), pp. 227-234. DOI: 10.1159/(00474940.
[0098] Desai, Brinda S.; Schneider, Julie A.; Li, Jia-Liang; Carvey, Paul M.; Hendey, Bill (2009): Evidence of angiogenic vessels in Alzheimer's disease. In J. of Neural Transmission 116 (5), pp. 587-597. DOI: 10,1007/s00702-009-0226-9.
[0099] Di Carlo, Paola; Trizzino, Marcello; Titone, Lucina; Capra, Giuseppina; Colletti, Piero; Mazzola, Giovanni et al. (2011): Unusual MRI findings in an immunocompetent patient with EBV encephalitis. A case report. In BMC Med Imaging 11 (1), p. 481. DOI: 10.1186/1471-2342-11-6.
[0100] Eimer, William A.; Vijaya Kumar, Deepak Kumar; Navalpur Shanmugam, Nanda Kumar; Rodriguez, Alex S.; Mitchell, Teryn; Washicosky, Kevin J. et al. (2018): Alzheimer's Disease-Associated β-Amyloid Is Rapidly Seeded by Herpesviridae to Protect against Brain Infection. In Neuron 99 (1), 56-63.e3. DOI: 10.1016/j.neuron.2018.06.030.
[0101] Ero\check{g}lu, İpek; İbrahim, Mamudu (2020): Liposome-ligand conjugates. A review on the current state of art. In Journal of drug targeting 28 (3), pp. 225-244. DOI: 10.1080/1061186X.2019.1648479.
[0102] Farrell, Christopher J.; Lee, Jae Myun; Shin, Eui-Cheol; Cebrat, Marek; Cole, Philip A.; Hayward, S. Diane (2004): Inhibition of Epstein-Barr virus-induced growth proliferation by a nuclear antigen EBNA2-TAT peptide. In Proceedings of the National Academy of Sciences 101 (13), pp. 4625-4630. DOI: 10.1073/pnas.0306482101.
[0103] Fonseca, Maria I.; Chu, Shuhui; Pierce, Aimee L.; Brubaker, William D.; Hauhart, Richard E.; Mastroeni, Diego et al. (2016): Analysis of the Putative Role of CR1 in Alzheimer's Disease. Genetic Association, Expression and Function. In PloS one 11 (2), e0149792. DOI: 10.1371/joumal.pone.0149792.
[0104] Frade, José M.; López-Sánchez, Noelia (2017): Neuronal tetraploidy in Alzheimer and aging. In Aging 9 (10), pp. 2014-2015. DOI: 10.18632/aging.101312.
[0105] Frenkel-Denkberg, Galit; Gershon, David; Levy, Andrew P. (1999): The function of hypoxia-inducible factor 1 (HIF-1) is impaired in senescent mice. In FEBS letters 462 (3), pp. 341-344. DOI: 10.1016/S0014-5793(99))01552-5.
[0106] Fuglsang, Anders (2003): Codon optimizer. A freeware tool for codon optimization. In Protein Expression and Purification 31 (2), pp. 247-249. DOI: 10.1016/s1046-5928(03)00213-4.
[0107] Fuhrer, Tessa E.; Palpagama, Thulani H.; Waldvogel, Henry J.; Synek, Beth J. L.; Turner, Clinton; Faull, Richard L.; Kwakowsky. Andrea (2017): Impaired expression of GABA transporters in the human Alzheimer's disease hippocampus, subiculum, entorhinal cortex and superior temporal gyrus. In Neuroscience 351, pp. 108-118. DOI: 10.1016/j.neuroscience.2017.03.041.
[0108] Gaidin, Sergei G.; Zinchenko, Valery P.; Sergeev, Alexander I.; Teplov, Ilia Y.; Mal'tseva, Valentina N.; Kosenkov, Artem M. (2020): Activation of alpha-2 adrenergic receptors stimulates GABA release by astrocytes. In Gila 68 (6). pp. 1114-1130. DOI: 10.1002/glia.23763.
[0109] Gannon, Mary; Che, Pulin; Chen, Yunjia; Jiao, Kai; Roberson, Erik D.; Wang, Qin (2015): Noradrenergic dysfunction in Alzheimer's disease. In Frontiers in neuroscience 9, p. 220. DOI: 10.3389/fnins.2015.00220.
[0110] Gate, David; Saligrama, Naresha; Leventhal, Olivia; Yang, Andrew C.; Unger, Michael S.; Middeldorp, Jinte et al. (2020): Clonally expanded CD8 T cells patrol the cerebrospinal fluid in Alzheimer's disease. In Nature 577 (7790), pp. 399-404. DOI: 10.1038/s41586-019-1895-7.
[0111] Grammas, Paula; Sanchez, Alma; Tripathy, Debjani; Luo, Ester; Martinez, Joseph (2011): Vascular signaling abnormalities in Alzheimer disease. In Cleveland Clinic journal of medicine 78 Suppl 1, S50-3. DOI: 10.3949/ccjm.78.sl.09.
[0112] Greene, Lloyd A.; Liu, David X.; Troy, Carol M.; Biswas. Subhas C. (2007): Cell cycle molecules define a pathway required for neuron death in development and disease. In Biochimica et biophysica acta 1772 (4), pp. 392-401. DOI: 10.1016/j.bbadis.2006.12.003.
[0113] Harley, John B., Chen, Xiaoting; Pujato, Mario; Miller, Daniel; Maddox, Avery; Forney, Carmy et al. (2018): Transcription factors operate across disease loci, with EBNA2 implicated in autoimmunity. In Nature genetics 50 (5), pp. 699-707. DOI: 10.1038/s41588-018-0102-3.
[0114] Hategan, Alina; Masliah, Eliezer; Nath, Avindra (2019): HIV and Alzheimer's disease. Complex interactions of HIV-Tat with amyloid 1 peptide and Tau protein. In Journal of neurovirology 25 (5). pp. 648-660. DOI: 10.1007/s13365-019-00736-z.
[0115] Herrup, Karl (2010): The involvement of cell cycle events in the pathogenesis of Alzheimers disease. In Alzheimer's research & therapy 2 (3), p. 13. DOI: 10.1186/alzrt37.
[0116] Holzerlandt, Ria; Orengo, Christine; Kellam, Paul; Alb, M. March (2002): Identification of New Herpesvirus Gene Homologs in the Human Genome. In Genome research 12 (11). pp. 1739-1748. DOI: 10.1101/gr.334302.
[0117] Hou, Tsung-Yun; Hsu, Hui-Ching; Lin, Tzu-Min; Chang, Yu-Sheng; Chen, Wei-Sheng; Kuo. Pei-I et al. (2019): Higher risk of dementia in primary Sjogren's syndrome. In Annals of clinical and translational neurology 6 (4), pp. 633-641. DOI: 10.1002/acn3.737.
[0118] Iwakiri, Dai; Zhou, Li; Samanta, Mrinal; Matsumoto, Misako; Ebihara, Takashi; Seya, Tsukasa et al. (2009): Epstein-Barr virus (EBV)-encoded small RNA is released from EBV-infected cells and activates signaling from Toll-like receptor 3. In The Journal of experimental medicine 206 (10), pp. 2091-2099. DOI: 10.1084/jem.20081761.
[0119] Jabs, W. J.; Paulsen, M.; Wagner, H. J.; Kirchner. H.; Kliter, H. (1999): Analysis of Epstein-Bar virus (EBV) receptor CD21 on peripheral B lymphocytes of long-term EBV-adults. In Clinical & Experimental Immunology 116 (3), pp. 468-473. DOI: 10.1046/j.1365-2249.1999.00912.x.
[0120] James, Lisa M.; Christova, Peka; Lewis, Scott M.; Engdahl, Brian E.; Georgopoulos, Angeliki; Georgopoulos, Apostolos P. (2018): Protective Effect of Human Leukocyte Antigen (HLA) Allele DRB1*13:02 on Age-Related Brain Gray Matter Volume Reduction in Healthy Women. In EBioMedicine 29, pp. 31-37. DOI: 10.1016/j.ebiom.2018.02.005.
[0121] Jha, Hem Chandra; Mehta, Devan; Lu, Jie; El-Naccache, Darine; Shukla, Sanket K.; Kovacsics, Colleen et al. (2015): Gammaherpesvirus Infection of Human Neuronal Cells. In mBio 6 (6), e01844-15. DOI: 10.1128/mBio.01844-15.
[0122] Jog, Neelakshi R.; Chakravarty, Eliza F.; Guthridge. Joel M.; James. Judith A. (2018): Epstein Barr Virus Interleukin 10 Suppresses Anti-inflammatory Phenotype in Human Monocytes. In Frontiers in immunology 9, p. 2198. DOI: 10.3389/fimmu.2018.02198.
[0123] Jones, K.; Rivera, C.; Sgadari, C.; Franklin, J.; Max. E. E.; Bhatia, K.; Tosato, G. (1995): Infection of human endothelial cells with Epstein-Barr virus. In The Journal of experimental medicine 182 (5), pp. 1213-1221. DOI: 10.1084/jem.182.5.1213.
[0124] Khan, Irfan Sagir; Loh, Kwok Seng; Petersson, Fredrik (2019): Amyloid and hyaline globules in undifferentiated nasopharyngeal carcinoma. In Annals of diagnostic pathology 40, pp. 1-6. DOI: 10.1016/j.anndiagpath.2019.02.016.
[0125] Kirino, T.; Tamura, A.; Sano, K. (1984): Delayed neuronal death in the rat hippocampus following transient forebrain ischemia. In Acta Neuropathol 64 (2), pp. 139-147. DOI: 10.1007/BF00695577.
[0126] Klibanov, Alexander L.; Maruyama, Kazuo; Torchilin, Vladimir P.; Huang, Leaf (1990): Amphipathic polyethyleneglycols effectively prolong the circulation time of liposomes. In FEBS letters 268 (1), pp. 235-237. DOI: 10.1016/0014-5793(90)81016-h.
[0127] Körbelin, Jakob; Dogbevia, Godwin; Michelfelder, Stefan; Ridder, Dirk A.; Hunger, Agnes; Wenzel, Jan et al. (2016): A brain microvasculature endothelial cell-specific viral vector with the potential to treat neurovascular and neurological diseases. In EMBO molecular medicine 8 (6), pp. 609-625. DOI: 10.15252/emmm.201506078.
[0128] Korte, Nils; Nortley, Ross; Attwell, David (2020): Cerebral blood flow decrease as an early pathological mechanism in Alzheimer's disease. In Acta Neuropathol 11 (Suppl 1), p. 149. DOI: 10.1007/s00401-020-02215-w.
[0129] Kosenko, Elena A.; Tikhonova, Lyudmila A.; Montoliu, Carmina; Barreto, George E.; Aliev, Gjumrakch; Kaminsky, Yury G. (2017): Metabolic Abnormalities of Erythrocytes as a Risk Factor for Alzheimer's Disease. In Frontiers in neuroscience 11, p. 728. DOI: 10.3389/fnins.2017.00728.
[0130] Kumar, Deepak Kumar Vijaya; Choi, Se Hoon; Washicosky, Kevin J.; Eimer, William A.; Tucker, Stephanie; Ghofrani, Jessica et al. (2016): Amyloid-β peptide protects against microbial infection in mouse and worm models of Alzheimers disease. In Science translational medicine 8 (340), 340ra72. DOI: 10.1126/scitranslmed.aafl059.
[0131] Kurt, M. A.; Davies, D. C.; Kidd, M. (1999): beta-Amyloid immunoreactivity in astrocytes in Alzheimer's disease brain biopsies. An electron microscope study. In Experimental neurology 158 (1), pp. 221-228. DOI: 10.1006/exnr.1999.7096.
[0132] Lai, Catherine Jessica; Tay, Boon Hunt (2016): Pharmacophore-based screening targeted at upregulated FN1, MMP-9, APP reveals therapeutic compounds for nasopharyngeal carcinoma. In Computers in biology and medicine 69, pp. 158-165. DOI: 10.1016/j.compbiomed.2015.12.015.
[0133] Li, Shaomin; Hong, Soyon; Shepardson, Nina E.; Walsh, Dominic M., Shankar, Ganesh M.; Selkoe, Dennis (2009): Soluble oligomers of amyloid Beta protein facilitate hippocampal long-term depression by disrupting neuronal glutamate uptake. In Neuron 62 (6), pp. 788-801. DOI: 10.1016/j.neuron.2009.05.012.
[0134] Lieberman. H. A.; Lachman. L.; Schwartz J. B. (Eds.) (1989): Pharmaceutical dosage forms: Tablets. 2 volumes. New York: Marcel Dekker (1).
[0135] Lin, Shih-Yi; Hsu, Wu-Huei; Lin, Cheng-Chieh; Lin, Cheng-Li; Yeh, Hung-Chieh; Kao, Chia-Hung (2019): Association of Transfusion With Risks of Dementia or Alzheimers Disease. A Population-Based Cohort Study. In Frontiers in psychiatry 10, p. 571. DOI: 10.3389/fpsyt.2019.00571.
[0136] Liu, Wenhua; Yuen, Eunice Y.; Allen, Patrick B.; Feng, Jian; Greengard, Paul; Yan, Zhen (2006): Adrenergic modulation of NMDA receptors in prefrontal cortex is differentially regulated by RGS proteins and spinophilin. In Proc. Natl. Acad Sci. USA 103 (48), pp. 18338-18343. DOI: 10.1073/pnas.0604560103.
[0137] Lu, Rui-Chun; Yang, Wu; Tan, Lin; Sun. Fu-Rong; Tan, Meng-Shan; Zhang, Wei et al. (2017): Association of HLA-DRB1 polymorphism with Alzheimer's disease. A replication and meta-analysis. In Oncotarget 8 (54), pp. 93219-93226. DOI: 10.18632/oncotarget.21479.
[0138] Luczynski, Pauline; Laule, Comelia; Hsiung, Ging-Yuek Robin; Moore, G. R. Wayne; Tremlett, Helen (2019): Coexistence of Multiple Sclerosis and Alzheimer's disease. A review. In Multiple sclerosis and related disorders 27, pp. 232-238. DOI: 10.1016/j.msard.2018.10.109.
[0139] Martens, Thomas F.; Remaut, Katrien; Demeester, Jo; Smedt, Stefaan C. de; Braeckmans, Kevin (2014): Intracellular delivery of nanomaterials. How to catch endosomal escape in the act. In Nano Today 9 (3), pp. 344-364. DOI: 10.1016/j.nantod.2014.04.011.
[0140] McCarthy, Jeanette J.; Saith, Sunita; Linnertz, Colton; Burke, James R.; Hulette, Christine M.; Welsh-Bohmer, Kathleen A.; Chiba-Falek, Omit (2012): The Alzheimer's associated 5′ region of the SORL1 gene cis regulates SORL 1 transcripts expression. In Neurobiology of aging 33 (7), 1485.e1-8. DOI: 10.1016/j.neurobiolaging.2010.10.004.
[0141] Mechelli, Rosella; Manzari, Caterina; Policano, Claudia; Annese, Anita; Picardi, Emesto; Umeton, Renato et al. (2015): Epstein-Barr virus genetic variants are associated with multiple sclerosis. In Neurology 84 (13), pp. 1362-1368. DOI: 10.1212/WNL.0000000000001420.
[0142] Meissner, Justyna M.; Toporkiewicz, Monika; Czogalla, Aleksander; Matusewicz, Lucyna; Kuliczkowski, Kazimierz; Sikorski, Aleksander F. (2015): Novel antisense therapeutics delivery systems. In vitro and in vivo studies of liposomes targeted with anti-CD20 antibody. In Journal of controlled release: official journal of the Controlled Release Society 220 (Pt A), pp. 515-528. DOI: 10.1016/j.jconrel.2015.11.015.
[0143] Min, Hyun Su; Kim, Hyun Jin Naito, Mitsuru Ogura, Satomi; Toh, Kazuko; Hayashi, Kotaro et al. (2020): Systemic Brain Delivery of Antisense Oligonucleotides across the Blood-Brain Barrier with a Glucose-Coated Polymeric Nanocarrier. In Angewandte Chemie (International ed. in English) 59 (21), pp. 8173-8180. DOI: 10.1002/anie.201914751.
[0144] Miyakawa, T. (1997): Electron microscopy of amyloid fibrils and microvessels. In Annals of the New York Academy of Sciences 826, pp. 25-34. DOI: 10.1111/j.1749-6632.1997.tb48458.x.
[0145] Moncalvo, Filippo; Martinez Espinoza, Maria Isabel; Cellesi, Francesco (2020): Nanosized Delivery Systems for Therapeutic Proteins. Clinically Validated Technologies and Advanced Development Strategies. In Frontiers in bioengineering and biotechnology 8, p. 89. DOI: 10.3389/fbioe.2020.00089.
[0146] Nassif, Samer; Ozdemirli, Metin (2013): EBV-positive low-grade marginal zone lymphoma in the breast with massive amyloid deposition arising in a heart transplant patient. A report of an unusual case. In Pediatric transplantation 17 (6), E141-5. DOI: 10.1111/petr.12111.
[0147] Ni, Yanxiang; Zhao, Xiaohui; Bao, Guobin; Zou, Lin; Teng, Lin; Wang, Zhu et al. (2006): Activation of beta2-adrenergic receptor stimulates gamma-secretase activity and accelerates amyloid plaque formation. In Nature medicine 12 (12), pp. 1390-1396. DOI: 10.1038/nml485.
[0148] Noh, Ka-Won; Park, Jihvun; Kang, Myung-Soo (2016): Targeted disruption of EBNA1 in EBV-infected cells attenuated cell growth. In BMB Reports 49 (4), pp. 226-231. DOI: 10.5483/BMBRep.2016.49.4.260.
[0149] Nortley, Ross; Korte, Nils; Izquierdo, Pablo; Hirunpattarasilp, Chanawee; Mishra, Anusha; Jaunmuktane, Zane et al. (2019): Amyloid D oligomers constrict human capillaries in Alzheimer's disease via signaling to pericytes. In Science (New York, N.Y.) 365 (6450). DOI: 10.1126/science.aav9518.
[0150] Ogembo, Javier G.; Kannan, Lakshmi; Ghiran, Ionita; Nicholson-Weller, Anne; Finberg, Robert W.; Tsokos, George C.; Fingeroth, Joyce D. (2013): Human complement receptor type 1/CD35 is an Epstein-Barr Virus receptor. In Cell reports 3 (2), pp. 371-385. DOI: 10.1016/j.celrep.2013.01.023.
[0151] Ounanian, Annette; Guilbert, Brigitte; Seigneurin, Jean-Marie (1992): Characteristics of Epstein-Barr virus transformed B cell lines from patients with Alzheimer's disease and age-matched controls. In Mechanisms of ageing and development 63 (1), pp. 105-116. DOI: 10.1016/0047-6374(92)90020-e.
[0152] Panikkar, Archana; Smith, Corey; Hislop, Andrew; Tellam, Nick; Dasari, Vijayendra; Hogquist, Kristin A. et al. (2015): Cytokine-Mediated Loss of Blood Dendritic Cells During Epstein-Barr Virus-Associated Acute Infectious Mononucleosis. Implication for Immune Dysregulation. In The Journal of infectious diseases 212 (12), pp. 1957-1961. DOI: 10.1093/infdis/jiv340.
[0153] Park, Hanseul; Oh. Jungju; Shim. Gayong; Cho, Byounggook; Chang, Yujung; Kim, Siyoung et al. (2019): In vivo neuronal gene editing via CRISPR-Cas9 amphiphilic nanocomplexes alleviates deficits in mouse models of Alzheimer's disease. In Nature neuroscience 22 (4), pp. 524-528. DOI: 10.1038/s41593-019-0352-0.
[0154] Parks, Christine G.; Cooper, Glinda S.; Hudson, Lori L.; Dooley, Mary Anne; Treadwell, Edward L.; St Clair, E. W. et al. (2005): Association of Epstein-Barr virus with systemic lupus erythematosus. Effect modification by race, age, and cytotoxic T lymphocyte-associated antigen 4 genotype. In Arthritis and rheumatism 52 (4), pp. 1148-1159. DOI: 10.1002/art.20997.
[0155] Reijmer, Yael D.; van Veluw, Susanne J.; Greenberg, Steven M. (2016): Ischemic brain injury in cerebral amyloid angiopathy. In Journal of cerebral blood flow and metabolism: official journal of the International Society of Cerebral Blood Flow and Metabolism 36 (1). pp. 40-54. DOI: 10.1038/jcbfm.2015.88.
[0156] Reynolds, Chandra A.; Zavala, Catalina; Gatz, Margaret; Vie, Loryana; Johansson, Boo; Malmberg, Bo et al. (2013): Sortilin receptor 1 predicts longitudinal cognitive change. In Neurobiology of aging 34 (6), 1710.e11-8. DOI: 10.1016/j.neurobiolaging.2012.12.006.
[0157] Rivera-Soto, Ricardo; Damania, Blossom (2019): Modulation of Angiogenic Processes by the Human Gammaherpesviruses, Epstein-Barr Virus and Kaposi's Sarcoma-Associated Herpesvirus. In Frontiers in microbiology 10, p. 1544. DOI: 10.3389/fmicb.2019.01544.
[0158] Satou, Ryousuke; Penrose, Harrison; Navar, L. Gabriel (2018): Inflammation as a Regulator of the Renin-Angiotensin System and Blood Pressure. In Current hypertension reports 20 (12), p. 100. DOI: 10.1007/s11906-018-0900-0.
[0159] Sheng, Morgan; Ertürk, Ali (2014): Long-term depression. A cell biological view. In Philosophical transactions of the Royal Society of London. Series B. Biological sciences 369 (1633), p. 20130138. DOI: 10.1098/rstb.2013.0138.
[0160] Simeoni, Federica; Morns, May C.; Heitz, Frederic; Divita, Gilles (2003): Insight into the mechanism of the peptide-based gene delivery system MPG. Implications for delivery of siRNA into mammalian cells. In Nucleic acids research 31 (11), pp. 2717-2724. DOI: 10.1093/nar/gkg385.
[0161] Tabata, Takako, Kawakatsu, Hisaaki; Maidji, Ekaterina; Sakai, Takao; Sakai, Keiko; Fang-Hoover, June et al. (2008): Induction of an epithelial integrin alphavbeta6 in human cytomegalovirus-infected endothelial cells leads to activation of transforming growth factor-beta1 and increased collagen production. In The American Journal of Pathology 172 (4), pp. 1127-1140. DOI: 10.2353/ajpath.2008.070448.
[0162] Tang, L-Q; Chen, Q-Y; Guo, S-S; Chen, W-H; Li, C-F; Zhang, L. et al (2014): The impact of plasma Epstein-Barr virus DNA and fibrinogen on nasopharyngeal carcinoma prognosis. An observational study. In British journal of cancer 111 (6), pp. 1102-1111. DOI: 10.1038/bjc.2014.393.
[0163] Tian, Tian; Zhang, Hui-Xin; He, Chun-Peng; Fan, Song; Zhu, Yan-Liang; Qi, Cui et al. (2018): Surface functionalized exosomes as targeted drug delivery vehicles for cerebral ischemia therapy. In Biomaterials 150, pp. 137-149. DOI: 10.1016/j.biomaterials.2017.10.012.
[0164] Timens, W.; Boes, A.; Vos, H.; Poppema, S. (1991): Tissue distribution of the C3d/EBV-receptor. CD21 monoclonal antibodies reactive with a variety of epithelial cells, medullary thymocytes, and peripheral T-cells. In Histochemistry 95 (6), pp. 605-611. DOI: 10.1007/BF00266748.
[0165] Toczyski, D. P.; Matera, A. G.; Ward, D. C.; Steitz, J. A. (1994): The Epstein-Barr virus (EBV) small RNA EBER1 binds and relocalizes ribosomal protein L22 in EBV-infected human B lymphocytes. In Proc. Natl. Acad Sci. U.S.A 91 (8), pp. 3463-3467. DOI: 10.1073/pnas.91.8.3463.
[0166] Toyama, Kensuke; Spin, Joshua M.; Deng, Alicia C.; Huang, Ting-Ting; Wei, Ke; Wagenhäuser, Markus U. et al. (2018): MicroRNA-Mediated Therapy Modulating Blood-Brain Barrier Disruption Improves Vascular Cognitive Impairment. In Arterioscler Thromb Vasc Biol. 38 (6), pp. 1392-1406. DOI: 10.1161/ATVBAHA. 118.310822.
[0167] Tsartsalis, Stergios; Xekardaki, Aikaterini; Hof, Patrick R.; Kövari, Enikö; Bouras, Constantin (2018): Early Alzheimer-type lesions in cognitively normal subjects. In Neurobiology of aging 62, pp. 34-44. DOI: 10.1016/j.neurobiolaging.2017.10.002.
[0168] Uchida, Naoya; Hsieh. Matthew M.; Raines, Lydia; Haro-Mora, Juan J.; Demirci, Selami; Bonifacino, Aylin C. et al. (2019): Development of a forward-oriented therapeutic lentiviral vector for hemoglobin disorders. In Nature communications 10 (1), p. 4479. DOI: 10.1038/s41467-019-12456-3.
[0169] van Diemen, Ferdy R.; Kruse, Elisabeth M.; Hooykaas, Marjolein J. G.; Bruggeling, Carlijn E.; Schurch, Anita C.; van Ham, Petra M. et al (2016): CRISPR/Cas9-Mediated Genome Editing of Herpesviruses Limits Productive and Latent Infections. In PLoS pathogens 12 (6), e1005701. DOI: 10.1371/joumal.ppat.1005701.
[0170] van Oijen, Marieke; Witteman, Jacqueline C.; Hofman, Albert; Koudstaal, Peter J.; Breteler, Monique M. B. (2005): Fibrinogen is associated with an increased risk of Alzheimer disease and vascular dementia. In Stroke 36 (12). pp. 2637-2641. DOI: 10.1161/01.STR.0000189721.31432.26.
[0171] Wang, C. Y.; Huang, L. (1987a): pH-sensitive immunoliposomes mediate target-cell-specific delivery and controlled expression of a foreign gene in mouse. In Proceedings of the National Academy of Sciences 84 (22), pp. 7851-7855. DOI: 10.1073/pnas.84.22.7851.
[0172] Wang, Chen-Yen; Huang. Leaf (1987b): Plasmid DNA adsorbed to pH-sensitive liposomes efficiently transforms the target cells. In Biochemical and biophysical research communications 147 (3), pp. 980-985. DOI: 10.1016/S0006-291X(87)80166-3.
[0173] Wang, Jianbin; Quake, Stephen R. (2014): RNA-guided endonuclease provides a therapeutic strategy to cure latent herpesviridae infection. In Proceedings of the National Academy of Sciences of the United States of America 111 (36), pp. 13157-13162. DOI: 10.1073/pnas.1410785111.
[0174] Weeks, J. K.; Helton, K. J.; Conley. M. E.; Onciu, M.; Khan, R. B. (2006): Diffuse CNS vasculopathy with chronic Epstein-Barr virus infection in X-linked lymphoproliferative disease. In AJNR. American journal of neuroradiology 27 (4), pp. 884-886.
[0175] Wiener, Julius; Kokotek, Daniel; Rosowski, Simon; Lickert, Heiko; Meier, Matthias (2020): Preparation of single- and double-oligonucleotide antibody conjugates and their application for protein analytics. In Scientific reports 10 (1), p. 1457. DOI: 10.1038/s41598-020-58238-6.
[0176] Yajima, Misako; Kanda, Teru; Takada. Kenzo (2005): Critical role of Epstein-Barr Virus (EBV)-encoded RNA in efficient EBV-induced B-lymphocyte growth transformation. In Journal of virology 79 (7), pp. 4298-4307. DOI: 10.1128/JVI.79.7.4298-4307.2005.
[0177] Yang, Yan; Mufson, Elliott J.; Herrup, Karl (2003): Neuronal Cell Death Is Preceded by Cell Cycle Events at All Stages of Alzheimer's Disease. In J. Neurosci. 23 (7), pp. 2557-2563. DOI: 10.1523/JNEUROSCI.23-07-02557.2003.
[0178] Yin, Huali; Qu, Jiani; Peng, Qiu; Gan, Runliang (2019): Molecular mechanisms of EBV-driven cell cycle progression and oncogenesis. In Medical microbiology and immunology 208 (5), pp. 573-583. DOI: 10.1007/s00430-018-0570-1.
[0179] Yuen, Kit-San; Chan, Chi-Ping; Wong, Nok-Hei Mickey; Ho, Chau-Ha; Ho, Ting-Hin; Lei, Ting et al. (2015): CRISPR/Cas9-mediated genome editing of Epstein-Barr virus in human cells. In The Journal of general virology 96 (Pt 3), pp. 626-636. DOI: 10.1099/jgv.0.000012.
[0180] Zamolodchikov, D.; Renné, T.; Strickland, S. (2016): The Alzheimer's disease peptide β-amyloid promotes thrombin generation through activation of coagulation factor XII. In Journal of thrombosis and haemostasis:JTH 14 (5), pp. 995-1007. DOI: 10.1111/jth.13209.
[0181] Zhang, Fang; Gannon, Mary; Chen, Yunjia; Yan, Shun; Zhang, Sixue; Feng, Wendy et al. (2020): β-amyloid redirects norepinephrine signaling to activate the pathogenic GSK3β/tau cascade. In Science translational medicine 12 (526). DOI: 10.1126/scitranslmed.aay6931.
[0182] Zhang, Fang; Gannon, Mary; Chen, Yunjia; Zhou, Lufang; Jiao, Kai; Wang, Qin (2017): The amyloid precursor protein modulates α2A-adrenergic receptor endocytosis and signaling through disrupting arrestin 3 recruitment. In FASEB journal: official publication of the Federation of American Societies for Experimental Biology 31 (10). pp. 4434-4446. DOI: 10.1096/fj.201700346R.
[0183] Zhao, Zhuoxian; Rocha, Natalia P.; Salem, Haitham; Diniz, Breno S.; Teixeira, Antonio L. (2018): The association between systemic lupus erythematosus and dementia A meta-analysis. In Dementia & neuropsychologia 12 (2), pp. 143-151. DOI: 10.1590/1980-57642018dn12-020006.
[0184] Zhou, Xiaohuai; Huang, Leaf (1992): Targeted delivery of DNA by liposomes and polymers. In Journal of Controlled Release 19 (1-3), pp. 269-274. DOI: 10.1016/0168-3659(92)90082-3.
[0185] Zufferey, R. Dull, T.; Mandel, R. J.; Bukovsky, A.; Quiroz, D.; Naldini, L.; Trono, D. (1998): Self-inactivating lentivirus vector for safe and efficient in vivo gene delivery. In J Virol 72 (12), pp. 9873-9880. DOI: 10.1128/JVI.72.12.9873-9880.1998.

The application's sequence listing, which the Patent Office published only in electronic form, follows.

SEQUENCE LISTING (177 sequences)

SEQ ID NO: 1 - DNA, 297579 bp, Homo sapiens
  ref <308>: DATABASE ACCESSION NUMBER: genbank/NG_007376.2
  ref <309>: DATABASE ENTRY DATE: 2019-01-02
  ref <313>: RELEVANT RESIDUES IN SEQ ID NO: (1)..(297579)
ataatttagttgatctgaaggctgtctctaaagcagttttatgtagtgattacagagaaggactaatttcaagagtattttattgtttaaaaaaatgtaaacattttatggatgcactagtgaagtaaagaccaataaatgaagcagtaactttaataaaagggtaagtaaaatgtcacatcctctgcctatattcaggtctgttaggtatgtgtagttaaatgtaggtaagttagttgataattatttatttaagcatttctttatgtctactcattaaaaagaaaaaaagattaaaagaatgttactatgtgaaaaactgcccatcactggggaaaagaattttattatgcaaagcttcaacgctatttacagtttagacttttgtagctattgaaggctgacattgagataaagaagttaatcatgtccttctgtcttggaggaggtagaaagagatgagaatgaatacaattcaggatctacttctggtctttgatgaggagttagcacacggttctgggaggaaagacaggttaagaggcatgtgaaactctcaaatacgtcactgcgtctgccaacgtacatgatacccagcaagctcacatcttcatggaaagcatggtaattcccaacactaccggaagtctggagtggctaagtaatccatatattcaaccaggaagcagctaaagaaatattctaattacctaggaaggtttctgatttcaaaaggacatgaataaaaagtagaaggaatccactcccaaggacggacatcagagtagcttaaaatgtgagaataattttaggggaattttagaggtttggttatagacttatgttcccccaaaattcatatgttgaagccctaacccccagtaccttagaacatgactgtatttgggtagggcctttgaagagctaattaaattaaggccactggcgtgggccctaatataatctggctggtattcttgtaagaggaggagattaggacacacagaaataccagaggtacctgtgcagaggaaagaacgtgtgaggacttagcaagggtgcagccatctgcaagccaaggagacctctgaggattccaatcctatctgcatcttgatcttagacttttctggaactgtgagaaaataaatttcttggtttaagccacccagtctgtgatattttgttatggcagctctagtaaactaatacagattttaaatgtcattaaatgtcaatgtttaagctttgacaaaattttctaaaggaaagtataaaaggtcattttctttcttttcagagcctgatgattgcgggaggggtaagccagctgcatggggatcatgatgcaatgctgatgcaggacagacagaaagtagatctcttccatttctattttttttttttctgttgagttgaatgatcttcagactgaaaatgaaagaaaggtcactggaaataaaggccaaagatgagtgacaggattatagaataagtcttagctgttctaaagaaggacatattatgtacccccacccccaaattcatatgttgaagtcctaacccgacagtgtctcaaaatgtgaccatatttggagatagggtcaaagatgtaattaaggttaaatgaggtcattagcatggatcctaacccaatatctgctgtccttataacaagaggagattagggcacagtaagacacagagggaagaccatgtgagaatacagggagaaggtggccatctgcaagccaaggagagaggcctcagaagtaaccaactcagccaacacctcgatttcagacttccagcctcctgaaatgtgaggaaatacatttctggtgtttgatccatccagtctatggtaagttatggcacccctgcagggttcatctggctcagacttaacgattgcttttggtgatatttatagggcacagataacagcctaaacacaagacgacagaaacgcggcccagcagactatgcataaaatagaaatggggtatctggaccaattggagtctgcagtgggatgcggttactaaaacagtcaaatgcaacatgaggctccaggcagagtagtgggcaacatctcccatgttgcagcagtcagagcacacttcgagtactgtaaaaagacacagacaagccagaacacatttagagaatggccaaggtgtggaaggaaccagaaaccatgccattatgcaactgttgaaggaagtgcctgttttaccttgtgaagagaagactctagaggaagaagtagcatgaaaaccgctggcaaatttgtaaagatctgaagtgtggaaaagaattattctgcttggtcactggggatacaaggatatctgagtgggagtttaaaggcgggggatgtgagctttaaatgggataagaacattctagtaaccagaaatgcccaaagatagaatgcacagtctggagagccagtgaatatctcacaaatggagacacttgaaactaggatggggatgctgttgtaggaattccagcagacaagtggttgttggttccttccccaactttgtagggttataactagggatgttcctgcgttttctgcttggaggatctgcaagacacctcagggcaggaaatggcattaaatgcagaacagagctagtggctgaaaagcaaaaagccatcaggatctctgagtagtgaaggaaccagagaacatgcaggcaatgtccatcattctgacgcaatcagcagcataatcatcttcccccaggaacatcttgaccagggaatgtgtcagtgtggtgaatttcaacagtggaaagagaaactgctaaatctaagaactttaatttttatagattatgatctcatctctacaattttgaatttcatgctcaataaaagttccttactctctttttttttttttgagacggagtctcgctctgtcgcccaggctggagtgcagtggcgcgatctcggctcacttcaagctcagcctcccgggttcacgccattctcctgcctcagcctccccagtagctgggactacaggcgcccgccacgacgcccggctaattttttgtatttttagtagagacggggtttcaccgtgttagccaggatggtgttgatctcctgacctcgtgatccgcccgcctcagcctcccaaagaaaagtccctcactcttaaagttgcctcctccttcccagggctggcttcatgggcatgcaaccctggagagtctcacaggccctgcggtgggaggagccccatgcttggtttaacgctctgccattgccatcttaaaattcttaatttaattttttttcttttttttgaggtggagtctcgctctgtcgcccaggctggagtgcaatggcacaatcttggctcactgcaacctccgcctcccaggttcaagcgattctcctgcctcagcctctggagtagctgggattacaggcaggagtaaccacgctcggctaatttttgcatttttagtagagatgggggtttcaccatgttggccaggctggtctagaactcctgacctcaggtgatctgcccacctgggcctcctaaagtgctgggattacaggcatgagccaccaggcccggccttaaaattcttaataatgtaacaaagggtctcacgtttgcattttgcagtggactctgcaagatttgtagctttggaccacgtttctctttgcattcagataccttcttttttgccttatttgctcatgcagacccggaacaaatacggaattgcggtgggtaaatgtggtgcagaaagtgaacaactgggtttgtcctgtcactttaggcttttccctgctgtcccagcttcatgtcacttacttgctattagatttgggagttcattagcttcattttcctgatgtataaataggaataatagtaacagcctctttggcttttgtaggaagtaaatgacatgaagcgtataaacaaatactgcatgacaataaatatttgtccttatttgttgaggacatccaaaggacattcaggggcaaaagtaatccaagagtcaagactgaatgcctagtgcgggaaaagacacacaagacaacatttaggggagctggtacagaaatgacttcccaggaaggaagtctgtaccccgctggctgagccatccttcccgggcctaggcacccttgtcagcgcaatgagcaagggagagaaggcaggctgcagtgcagccctcagaagggccagagcactccctggcttcagtccttcgctccaagccctgtgtggagtgggctgtggcttggtaactaaatgctacttcaggtcaagagcaggggatatatctgggcagttctagagcattctaaactatctggacactaactggacagtggacggtttgtgtttaatccaggagaaagtggcatggcagaaggttcatttctataattcaggacagacacaatgaagaacaagggcagcgtttgaggtcagaagtcctcatttacgggggtcgaatacgaatgatctctcctaatttttccttcttccccaactcagatggatgttacatccctgcttaacaacaaaaaaagaccccccgccccgcaaaatccacactgaccaccccctttaacaaaacaaaaccaaaaacaaacaaaaatataagaaagaaacaaaacccaagcccagaaccctgctttcaagaagaagtaaatgggttggccgcttctttgccaggtcctgcgccttgctcctttggttcgttctaaagatagaaattccaggttgctcgtgcctgcttttgacgttgggggttaaaaaatgaggttttgctgtctcaacaagcaaagaaaatcctatttcctttaagcttcactcgttctcattctcttccagaaacgcctgccccacctctccaaaccgagagaaaaaacgaaatgcggataaaaacgcaccctagcagcagtcctttatacgacacccccgggaggcctgcggggtcggatgattcaagctcacggggacgagcaggagcgctctcgacttttctagagcctcagcgtcctaggactcacctttccctgatcctgcaccgtccctctcctggccccagactctccctcccactgttcacgaagcccaggtgggccgtcggccggggagcggagggggcgcgtggggtgcaggcggcgccaagggcgcgtgcacctgtgggcgcggggcgcgagggcccctcccggcgcgagcgggcgcagttccccggcggcgccgctaggggtctctctcgggtgccgagcggggtgggccggatcagctgactcgcctggctctgagccccgccgccgcgctcgggctccgtcagtttcctcggcagcggtaggcgagagcacgcggaggagcgtgcgcgggggccccgggagacggcggcggtggcggcgcgggcagagcaaggacgcggcggatcccactcgcacagcagcgcactcggtgccccgcgcagggtcgcgatgctgcccggtttggcactgctcctgctggccgcctggacggctcgggcgctggaggtgggtgccgcgcctcggaaggcggggggaggctgcacggtggggacgcgataccccccaagaccttaacccaagtctttaatgcagagaagccgggggtccgtcaatgggacccctctcctctccgcccccgcttgcggacgtccagcgcatccccgctttcggcccagccctgccccagggagtcgcgctccggcccgctgagagggagcgggcgaggcgctggtctccctggttccgcgccagcccggggcgagaagggtagggggcgaccctgagcccagaccccgacttagtccctgccttggaagcgggggtcgggggaggcgagagacattcagacaggggggaagggggaaggagcacgtggggaaaaccgaaaacgcagcgtccctaaagccagtccttcgctcttgaatcgttgccctttcctttctcttgggccctggggaggaggaggaggagtcgggacagcccaggaagctaggagcccctcgcttttccctgcgttctccgcctcgtttcaccttcctctctcacccccatcccccttccttgctccaacctcttttcgcggctgctggcggcggcagcctgggtgcgaccctagcccgagccggcgtcggggtcgcgcaccgccttccacaggcaaactttgtgcatgtccgcgtctcccttttgtgtaacttgcgagaaatgggaggggtcggagacccatagccaccccgcgccttccccaagtctggacgtcccgggagttcgctcgcaccctaagctctgtctgagaggcagaaggtccgcgggaacaaaagccgcgacaccccgccctcgccgtgggccgagccgcgttagtctcagtgcgccaccgaggctcccgcccggctcccttcccggggctgcgcgtccgcctgggagggggcagagacgctgccggggcttctggcggagcctcggggcccctctgcttcccaccctcggatcacctccgaggcttaattctgtgctgggctgtaaagtccttggcggggaggaaataaggcggagagtgggatgtgcgtctggaaagggcagtggcggatggtggggaggcacgggctctgtcctgtgcatccaaggaggcgtttgtctgattaaggcgcggcctcttccctggcagctctggggactctggtttagttcccctgggggcacaggatgctggggagggtccgaagggtcttttttttagggtgcagataaaaggatcgaattgagtgaagattaagacggagaagatggcgcctctgcagtgcagcaaagaaaagctgtgtggaggctgcagcctagtgaaatccacccaccactaggtgtataacaagtcttccccattcatccaactctcgaacattcagctaacgcctgtgcacaatgactgtttttctttacatctgaagatgcttagaagttgtttgcatgacagttgggccagaggaggctgtatttcacttcggacttcggttgggttcctgtttggcatcttaacatttgcaaccttccttacccgtttttcccctcttttcccccagcctcctagtaattttccaaaagaaaaaaagcaatttccgggcagatgttttcctgtaattccactgaggctgtacagactatcacaccattagttttttagtttctaatttgcaaggtcattgaacttttttctcttctgatttttacccacaagtggctcaggaatcaccttagggctagttaagacaggttgttttaagagttaaagaatttcgttttccatgttttaaaaaaatgcacttaactaagagaattctgatttctctcatgacttacttacatttatttgtagaattattccagttttcccgaatggtcttactacagattaaaaaccatacatttaaggaattaaaagcatatgataaccgtatttttgaagcttttgtcaaaacttaaatatgtaactttgttgagcaatatttctttctgtataaaaagaggaagcatgtaggcagattcgaatttagtttttggtctgtttaattgcattaatatgctctttctgccatcttttgggaccttttcagtagctattgttaactcctttaaagggtggaggtgagattcacattatgccattttgcgaagtgttggtagaagggtaggtaattcagtctactgaggtttgagggtggtttatctggttctctctgtgtccactgaaaagatgtaattacgagttgactgtcttttatagagcttagaaaataggtctgctgcaggtggctgtagaaaagaaatgaataagggcaatgataatggggccttggctatcgggggaaacatggttattatctgggttgatgattttggctggtatgttgatagaggtgtgagtttaacaaaccctaatctatatgatgtttcactaccctaatatttatttatttatttatttttaaatctagcttcctcttaagttttatttccctctgttgagggtttaacctagtcacaatcatcttacctttgtggtagtgctaatttatagtttatggaaacctgctgctactgactagtacctcgctaaaggtagaagccgacacacagaatagtaaagctcaggtttgatggtgatctgtaaggagtcacggttcttgctaatcgatgagaaaccatgataactggcagactgcagaagcttttctcttgtcaccggaaccagcagaggctcctgaacgacatttgcaaggctattagtactgcggagaagttactagatggaataatactggtcctgactgaggaaatgaaaaggaacatgcaagttcacgaggttaaatgaggaatggctgattcaaaaaaattaaaaagaaataacgtgatcaacaatattggtttgaaggaatgggagaggttgtctttatgttaagtcttgttgctagaggatctctattttatgttactgttttttgcatactagagtcttctacagatatttgtatgaatgttgtcagtcattctggaaataagcatagctattacttgcatttcacgtggccactaaactatcagtgagaagtgcattaaattcagtagaaatgtacattgtttctgcaaattgtattaccttgagaatcttacaaagcatctttcattaatacatttcttttaaaatctctatcaattacaaatgtaaagataaacctgtacagatgcattttaaatttaaagcttccagaatgtaaggtttagttcgactgcatacctcattacctccccttccctcctccctccccttactcccaggaagtttgcagggtaaataaaacatgcacatgataataaaacaaagtggaatgtactaaaataccaaaaggaaaatacagattaggtatactgagtaaatatgttacagagaaaacttcctgtatttaaaaagtaaggaacaatgggatgagatcatagataatcctggagcatttcctggtagtaaatttccagccaggtttatatcccaggtctggggattggaggttaagtttctgcatatacaatatttgtttacattcctctctgcctctaccagacagacagacagacacacacacacacacacacacacaccctctgtctctttctctctctttctctctctctctctctctctctctctctctctcacttgagtgacagatgctggtgcagggtattctcaacaggagtagggaatttgaaataaggagttgagaggtcaaaggtaaggggctgaatgcaggaccagagagcttcagtagcatcttgatgggcagagtatgagatgaacagtggcaacgaggaggatagggaaaaatcacattttctgtttgtgttttgtttttgtctggtggttttcaacctctctctgtttcacttgactatgcttgattatgaaatcttttttttttctttttttaatttaaagatctcaactggctttgttgtgattctacattcaggcaacactattctgtaaaatagtataaatgttccgatgagttgaacagaggagattggctttgtagacagaaaagggctgaagaaaacagaaataaaaaaatcttttccttttcatagtgagagctcagatgcaaatgtatggagtggggatggatgggaaatgccgtcttttgcaaacccttggaaacgctgtcaccctgtgggtctcacagccagtgtacagataacaccctcatctgtacacagaagacagaaggtggcaggggaaggaatgagcacaccccagaatgagtagcaagtttaatcaataaaatatgtatttctttttttattgttgtataagaagaaaagcagacagaactcaaaccctgaagctgattttgcaagtgaaaagcttagtaaagggggaaatgttatgtaactattttttcagtttagtgtggatggcttaagaaataatcattactgtgaggacactagtatttttcttggaaaaaaaagtttggcaaattttcctctttagattaatcttggttatagattattattatgcttgagtggtacctcttcagaagtagaaatctggcaaaaactggagtacaatgattgctctaggaataaattcacatatttaaatttaaaagcctggatatgtgcatcaattaatagctttatgaaacagggatgcttagtagattagctagctgagtattcagagagggccacagaagtctcaggttcacatgtattaaatctgctgaaatagaaacctaagagatcattttatttaggtttattttgtgtggctacatgttgaagaaacatgcaatagagatttagcttgaaccttgcgagactcacagtatcttacgaaagaagatagttaaaatggggaagatgagaggtttttaaaaatgtcacctctgtagaacgaaccagagttgttctcaatttataatgttgaatttgatgccaggcgtgatgttaggccaataacactgagtcattgagtgtttctcaggtatgtagagaaggcagcattgcacactaatcaggagagtttagaccagggcaggaatgcatgggcataaattctgtctttgtttcttttgagctagtgaccatgggcaagtttctgtgcctcagttttttcctttgtaaaatgggatgagtacttctagttattgaggatcgaattaatatctttgttaaatgcttgaaacagtgtgtgagttaatatatatgtaacctgatggcatagcataagcactgtgtgttagttgctgctatgtatggtgatgatgttgatgtacaatgggtatatgtaagtttcctgcatagttgaaagttaaaaatctagatgatgtttcacttattgacaaattacttattggccaattaagactattgcaggaaattgacagattgttgtctatgagtttgatctaaatttaaaaagcacatggtatctcagatacaatttttagaatacatgttataaaatttcatttattaaatatgtattgtgtatttcaattggttttttgaaaaatgaaaataattcatgctcattgaaaaatttaaaacagtacagaaatgtgcaaaaagcataagcattttttacacaaatgggaaatacctagtttttttttttctttttttccacataacatggatgtagaccttttttttttttttttgagacagaatctccctctgtcacccaggctggagtgcagtggcgcgatctcggctcactgcaacctccgcctcctgggttcaagcgattctcctgcctcagcctcctgagtagctgggactatgggcactcgccaccatgcccagctaatttttgtattttttaagtagagatggggtttcaccatgttggccaggctggtctcaaactcctgacctcaagtgatctgcccacctcggcctcccagagacctattttttaatgttgtacacactggcagcttgccacagatgtctaatattgagcaagtttatacactggcttgattattaactattagttggctatcagctatgtgcaaggaactgtgaacagacttggtttagttttcagtagaatctttgctagcaaaacgaataaacaggctttgccaatctgggtagaaatggaagatttcaaatgccagcaaaagaattttggtcctaatatggaagcttgaagttatgttcacccaaggacagggaaaccaaaaagcagattgcttgagaatgcggcatttctctaggaaatcagtttcaaaataaaatgaattttttgttttgttttgtttttgagacggagtctcgccctgtcgcccaagctggaatgcagtggtgcgatctcagctcactgcaatctccgcctctcaggttcaagcgattctcctgcctcagcctcccgagtagctgggattacaggcgtgtgccactatgcccagctaatttttatatttttagtagagacggggtttcactatgttggtcaggctggtctcaaactcttgacctcgtgatccgcctgcctcggcctcccaaagtgctgcgattacaggcgtgagccaccgcgcccagctgcagtaaagtgaatttgtgtaaccagccatgttatggctgttacatctttaaaactttatagtgatctgctgtttaattgaaattatatattttttttaaaaatcagcatatgttgctcaaaaataaaaggtttttagcttcaaaagcaggccaaggatatttgaaagccttgagtgtatgaaactggtgatactgtggttaaatgatgatgaacgcagggaaaaatcaagaagcagagtcccaaagaattcacatgggtttttgttaaccagctcatgtaattataattgtcctgtccaactaaagacaagaagacaagaagtgggttcacatacgaggatgtgtaatgacagaagccatatttgtgataaacatcctgattacagtagatacagtgaggagtgattaagatggttccagaagcaggagtggagggttcatgagcagggatgaggaataaataggacaaacattttggaaaagggaaaagatgaataagcctgttttgtaaattaatggatcctgatgaatgaagtgcagtgattccttaaggtcttattaatgatggaccccaaacagtgtttgaatctcttaatttccagatggttcctttttttcttcacaaagtcagaaggttttcttatgagaaatttgattcaacaagaataattgtcacttcttttgttttttggtgatttttttttttttttttttttttttttttgagactgagttttactgtgtcacccaggctggagtgcagtggcgtgtcttggcttactgcaacctctgcctcccgggttcaagcaattctcatgcctcagcctcctgaatagctgggtttacaggcatgtgccaccacgcctggctaatttttgtttttgttttttttttttttagtagagacagggtttcactacattggccagggtggtctcgaactcctgacttcaagtgatccacccacctaggcctcccaaagtgctgggataacaggtgtgagccactgcacctggccaattttttggtgattttgataggaatttttttttttgcctgatgctttttttgagagaatctaataatttgtctcttatttaataatttggctttcattagcttccagaaagccacatactgtcttcattgaaaaatgtaaggcatcctagatgatacagactgataaattacttttcagccataaaagatacttatgagaataagagatctgttgcataaagaaaagtcatttgtgttaagtgaagaaatgcattattactcttgctgctttgctaaatttcaaacattgaataactaatatattttgaccccctggagatattttacaggaagaaaaatgagaggtttaatcctactgttgagatagacttaacgtgttttagacctgcccctcatcccaagttactacaaactcatttgtttagtttttccttgtctgtgtgctcgttatttcacagtaaaattagtgaggcaacataaattttatttttaagagaaagtaaagaaaatggctttatccattaaaggtttattcatcttaaaaaaggacttgttatatctactcctactattggatgaattttcaaaagcatattgatactgtgtttggttttgtttgttttcgggacaagtcctcactctgtcacccaggctgaagtgcagtggtgtgatctgtagccgtggcctcctgggctgaagccatcttcctgccccagcctccagagtagctgggactacaggcatgtgccaccacatctgactaatttcttaaatgttttgtagagatggggtccccactatgttgcccaggctgatcttgaactcctgggctcaagcgatcctcctgcctcgaccttccaaagtgctagattacaggtgtgagctattgtgcctggccaatgttgtttttataaatatcattactcagttattttgtttataattgaattgataggctcatagaataaagatggataagcactgtttcttaactgtatttattgatttttttatctttcaaaaaaaaaatcctcatctacttcaaagattaagcctttaaaaccgatgcaaagtttttgaagtcttagcttaagtcttcagagactaacattaaaacccatcatatgaaaagtgatatgtagtagcaaatattctccatcctgatgctctcaattgcttattatggtttaacacaaatataattttgtcattacagtaaattagtttgaggatataactgaagagtacctaagaaactcccatagaaatgtgaaaatatgcagactaattattctaagaataattaatcatagatacttacatattaaattgattagcaatttaaaattaaagccaaatttctgtggaaattagcttattttcatacacaaagaaacctagattcttaggggtacaaccaagaaagggccactccttcatttcacaaatattttcgaggtccttgcccccaagagggtagacagaataaaaaggaggaaggaagtgacttggaaaaaattaagttgggtaaggaatataagagaatgctacgtagaaggatgtgtgttgtgaatgcaatagtttctgtagtattgtcaaagttctctgatcatttcagtatgtgaaggtaaacttagataactgggggaaggaactatatatttactacattgtaaaagaataattgtagacagaagatctactttgggtgattaaatgttgaaaacaagtggtgggagagagaagttagtgttgattgtgatcacacacttttctatacagtaatttgtttgatcactcatgataatgccttacattttgtatgtactaaataaatgagttctctagaaattctatgttgtggtgataaagaattacgttcagattgaagattcgaacagctgtgcaaccttctcaacatttaagaaactgcgaacaagcatagaaagaagattaaagccttttaaataagattcttttttttcagcctctttttggaacattttattgtgaaaaggtttcataaatactgtcaatacatcacgttcagtcatttgcaattgtatttcaaaaattcagttggcctgcaaaaagaaaaaatgcctcatttttgaaatatttcatccatgccctgattgattgggacactttcaatagagggtgcctagacataattttgtgtgaagaagttagtagagtttggaaagaaaatgtgtattggaattaaatttagtggcatgaaaatgaaaatttctctgtcattgtctttttttttggctccttttttggccattttacagctagtgtttagtgtgacaaggatcaaaattggccctttaaaaaaatatattgaattctattacctctgttatctaaaagaattgtatttttcaatttgaagagcttgaagccaatactactatataccattaacttgacaggaattgaaaatctaattgaggtcattatgattagccttgtatcttgctagtattttctcaatcttattttgaatgttttgtgtcaagtgttaaatcctcttataccacagaatccagaaaatttaaatgcaacagaagtaaaacgaatataaaaattctatggttgttgtggaggggcgttcttggctaacccatagggtgtttgaatgtaaaggcagcttacagaactgctgctagttgaattgtggagggtttcacttttaagagtacatttgagacaaaattgcaattttggaatcacttattcctgcttgttcagtgaaataggagaggggggaattcctgagggaagctgggagatttccaggtgatgatagagtagccatgtgagtatttggctgaaacagagtagaagccacctctgtctgttggacagaggtggccttaacactgagtatcaatcagcatggccattagagctgtccaggacaaacataatgaatgttgtggtggcagagagggtatacttaaatgaacaaaattggaggctgactttccttgtttcttggtagttcctttcttcgtatttgctatttggatatttcacttcacttttgtgagctagactcaaaggttaaatttatatcattgtgaattttctgggtcatattgtagggacacagatgggaagcatcccttcagtttattgagagtatttcttatgcgcatgtgtttttaattgtatttattgatttaataaatagccgatgagatgagaaaaaaatattagtgtcttgttgttgcagagaaaaagacattggatgcattcttagaatttattatcacatgcgaagttatttagatttacaaagcaatctgacatgttgacttcattgctcgtttgctcatttctatcagaggttgaacacaaagccaagcctaagcccgtgattcttctgtgtgcagatgagggggaaggtttaatgcagaatgtttagctgaatatttggattgtgcattccccttttatgtctctactgcaagttttctcagggcatttgtgattgacttctgtgatgttgacatttatttggagttagatgtttaaaaaattactaatttatggcctggtgcggtggcttacacctgtaatcccagcactttgggaggccaaggcgggtggatcacgaggtcaggagatccagtccatcctggctaacatggtgaaaccctgtctccactaaaaatacaacaaattaaccgggcgtggtgacaggcacctgtagtcccagctactcgggaggctgaggcaggagaatggtgtgaacctgggaggcagagcttgcagtgagccatcgtgccactgcactccagcctaggcaacagagcgagactccgtctcaaaaaaaaaaaaaatttactatcttattgtttctctcattttgaatttgtgaaattattattcattttatggacatactgcatggattctgtgtttcagttatgacaggagatctagaatctgggtggggctgtgagtaaatagaaaggtaactcagtctgtgccttgaggaattccgcagtccagtggaggaagaaagagacggagaaataattaggtacagtgtgccaaaggctataatagaggaggtacaaactcttcccagagaaggcaggcagaatttgaactaggtttcaaggatgtgtgaaggtgaactggggtggggagggcttcccagacagaaaaaacagcgagggtgtagagtttcaaagggggaagcccaggggtataataagtgaaggagacagtgtgaaattataaattttggatgcccttaatgagtttgaacttcattttcttagaaatggagtacttttaaatgttcctaaaatggggacgaggcattgatattcatggttcagttaggtttaggagcttttgtagaagtccttttcaaggtctgcttaatctcatgggccagatagtgacacctcgatgcaagggagcatgtaaatgtgctctattagctgggagcattgctatcagaaattacatttccggctctcttcttaagggtaaaggagaggtaggatattgagtggcaactggcattctgggatgtagaagaaatacagtaccataaagggatagaggaaaatgggtagacttaacgttctgaaccaaagctaagattctccgtgagcgattagagtaggcttttgggatttgcttaccttctcttatctgctagccagccacacaggaagcacatctttgtggagtgacagaggaggaggtaggaaatgctttctcatttttatggtagaaacatccaagagctgagccttcattctggctgagagaactctagatggttcagacttgcattcctgggaaggccttccagctagagtgatggaacaaagcaatgatttctgtggccctgtgtggacagcagtggcagtcagtttactctccctgttggttaactgtctttcgtttgatctagagacttcctcaaaacaattttgttgtgcttgttctttgaaagcaacagcagacaaaacaagctttgaggtttttagaaaagagcttgacactgagcacctcttttgagctagatctgtctgtcatgctgaacctgttttctgtggctgcgtagcttttcaaatctgtttatgcttgctggtgttattgaaacagaatgggaagatctatgcaaaaaggaacattgatcttaataaatttatgtcagtaagaatgggactgccattttaaaatttattttaattccttacctattttcttgttcaattattctaaaagtgattaaatgaagatacgtcacagaaagtatgctttgaaatcaagatgtggggaaaacctgtagttctgagtaggcctgatagaatcatcattgttagagtatttggaggttttgtagtagggattttgtcttcacttaaatatttagttgaaatatgttccaatagtttgacacattacagaatctgtctgaaagaaatgtctaaaatatgattcctcagaagctgctcttggttttactttctgctgttggttttactttctaacatttcattttgatcccgcagttttaagagtaatcaaaaaggccgggcacggtggctcacacctgtaatcccagcacttcgggagactgaggtgggtggatcacttgaggtcaggagttcaaggccagcctggccaacatggtgaaaccccgtctctacaaaaaatacaaaaatcagccgagcgtggtggtgcatgcctgtagtctcagttactcgggaggctgagacaggagaatcccttgaacccaggaggcggaggttgcagtgagccgagatcataccactgcattccagcctgggcaacagagccagactctgtctcaaaaaaaaagagtaatcaaaaagctacattatttaaatcttggcatgtctttaaaaaatgttaaactgtcaggaaaattatcacttctggataccaccttcagaaaaacacatgaaaatttgtgcatgtctcaaatagttgttaatttatgaaaaattagaaagagtgtttgaatgtatatttctgtcatattatattgctcatatttttaaattatactttttttcacccgtgaagcccatatagttaagtttgaaaattttaattatattagaatttgaaaattaaataaatctcctttaattcatgcataattttctaatagtcatatagtttgtattatataatttgagaaacttggttctaaaaaaattgtctgccaaagaatgtatatttctgaattctgttctgctttcatacatctgaaaatatttgagctatcataactggctatgcttcaaacccagtctgaaatgggtgacctttgctggctttggattgcagagctgggggctgttgtttgctttatctgatttaaaatagtcagtagtttattttgcaggcagttagatgtatacctttgcataaaatcattgaactgaaaaggttggcactccaagaatacgttgtgagaaaagagaacttgagtactcactctcgactcacctgaatcttattaatattttattgattaatatctgttgtatttttaagtaaataagctctctagaaactatctctgcttctttgttcatttaaaatatattaaacaaattgatacagattgcaaaaattagttgcaacgttcctagttagatatcaatgaaataaaaatggtctattcatacgagttcattttagttattcctactaatatcaaatgtgttttaaaaaatgggagattataatctttttatgaagtaagataaattattactttgtatatttaattcaaagaaaacaaaaaggccacaagtgcctgcataaaggcacatccacttaggattattgttaaggcctacagttgataattaggattcaggcatagcataaatgaagtggtatctttttttttttttttttttttgagacgaagtctcgctctgttgtccaggctggagtgcagtggcacggtctcggctcactgcaagctctgcctccctcctgggttcacgccattctcctccctcagcctcccgagtagctgggactacaggcttccgccaccactcccagctacgtttttttgtatttttggtagagacagggtttcaccatgttagccaggatggtcttgatctcctgacctcatgatccacccgtctcggcctcccaaagtgctgggattacaggcatgagccaccgcgcccagccagatatcaattatttttagacccaatgatatttgctgttgatttattgttggtgcacaaaataagaaaacaaaagcatggttttaaaacagccctttacacatttaatatggaaatggtaacctacaggtctgtattccatacagattcctgggctcattttatctgtgaattcctctgggcgtcatgcatgcccaggactgactttaaagcagaattatccagtagaggtataataggaccgttagatctaatttaaagttttcaagtagccacataaaaaaataagcaggcgaaattaattttagtctgtcactaaattcaaaatgttatttcaacagggggtcaatataaaagctatttatgaaatacattattttttcatattatgtcttcaaaatgttcacatttcacatatttattttttattttattattactatttttttgagacggagtctcactcagtcggttgcccaggctagagtgcaatctagcttgctcattgcaatcttggctcattgcaacctccacctcctgggttcaagcagttttcctgcctcagcctcctgagtagctgggattacaggcgtgtgccatcacacccagctaatttttttatttttggtagggatgagatttcaccatgttggccaggctggtcttgaactcctgacctcaagtgacttgccgctttggcctcccaaagtgccgggattacagttgtgagccaccgcacctgattacatatttcacatattttaattcagaccagctgcatgtcaagtacttagtagccacagatggctagtggttactgtattggacagtgcagctctaggagagtctcttcaacctgcagctgtctaggaagagaatcatagtttctggaacaggtagaatctataagacctcctttttaagcttctccactttacagatgaagaaagtaatatctggagatgttgagttgttcaaaatcacccacattttaaggatcaagagcccagtccctgttctctaacttctaatctctttcttcatcactttttctgcttcatgttgctgcatcccctttagttactaaggtactaacgttaggttgttgctatcagttaaatattaagccaggagctttaagacaatctggcccacttgaaggcatggcctgatttggacaaaacttgtggggtaggatgaatagagttaccaggcatatcttcaacctctctgtggactagtattatacatatatgagatgatgtagggtccagtgatcagttcatctttttctattgtgagcactgttggaataggaatggggggaccttttgggacccaggatatgtgattctgaaccctgaaatgtcagatgcccactaaaaggaaggggagagatggacctgtcattaccttacacattttattgtctgtatgggtatgtaaacatgtacagattataaggaattgcacttcatttctgggcttctggaaacacaggtattaagatttcatttacctccccttgttttggaaggcttattgtgtgtgtgcccatagttcttacccagttacacttaaagtatgatactttttgacagcttaagcctattgcattcctggcatgtaaaatagttattttcagaatgtaagcaaatgtggaaagcttactgcctgacatggagggttggagaagtgggattggtgttcttttgttgtaaactcatttttgtgaaatatttgctttacaacgtgaagcatgcatgatggatgaacttttagaattgaaagttatttttcatttcattcctgaaatatttaccagcatggatgttgactgagtgctttgaagagtttgcttagtcatataacttaggttttatgattttagatttaattaaacttaaagttttcctgtttgatcctcaggacttctcatctgtggcaaggctttactcacaaaggaaatatcaaccttgaagttaagcatgccctgtgtttctttatattctgatgaaaacgattgaagtttgccagtgctgtgtctgggacaatgcttagaggattcatggcttgtaggaatgagttaaaagtacaaggatattggctggcatggtgactgtcgcctgtagtcccaaaactttgagagtctgaggtcagaggattgcttgagctcaggagtttgagacaagcctgggcagcataaggagatcccatctctatgttttttaaaaaagtgaaaaacaacaacaacaacaaggtacaggggtatctgcgtttccttaggcagctgtcttatatacctttaaccttaaaaaaatccaccatttttaaaacagtgttttctgttgtttttcttagtaaatataaacaataggaactgaagtttagggcttaaaatttttgagagaataatttttatttcagtagcttttggggtacaagtggtttcttgttacttagttgaattacgtagtggtgaattctgagattttagtgcacttaagtagggtaccttgtacctaatgtctagtttttcttttaatccctagtcccctattaccctcctcctcgtgagtctctaaagtccaatatgtccctctgtgtgcctttgcttattcctaacttagttcccacttataagagagaacatacggtttttggttttccaattcctgaattactttacttagaataatggcctccagctctatccaagttgttgcaaaagacattattttgttccttgtaatggctgagtagtagtccctgatatatatatgccacatcttctttatcctctcattagtcagtggccacttaggttggttctgcatctttgcatttgtgaattgtggtcctgtaaacatatgtgtacaagtgtctttttcatacaatgacttcttttcctccgggtagatacccagtattaagattgctggatcaaatggtagatctacttttaactctttaggaaatctccataatgttttccatagaggtggtactagtttacattctgagagaataatttttgtaaaattatgtttaagctagatttggaattgggaaagaattacattctttataggaagcttttgaaaaatatatttaaaaatatataaaaatatgcataatcctaccacccacaaatgtctgtattattatgtcatttctaaaccatttttgagattatgctatagattacgttttagatcctacattttatttcttaacattaaatctcatactattttaagttctttgtacatgtaatgtttactgaatgggtaaatctgtttagggaaactggagctatgtagttgtggacttgtgcttttgttttgttttgttttgtttgtttgtacatttgctttttagaaatgtctattcagatccttggcccatttttttttttttttttttttttgagatggagtcttgctctgtcgcccagactggagtgcagtggcgcgatctcggctcactgcaagctccgcctcccgggttcacgccattctcccgcctcagcctcccgagtagctgggactacgggcgcccgccaccacgcccggctaattttgtttttgttttgtatttttagtagagatagggtttcaccatgttggccaggatggtcttgatctcctgacctcgtgatccccccgcctcggcctcccaaagtgctgggattacaggcgtgagccaccgtgcccagacagacatgtgcttttttatttggcatttctagcctgaacataggctggaagtagtgacttagagagggattgtttgccaaatatcaggtaatattttaattatttattatttattgtaatgctgtgaatcaggagtccctaacccctgggccatggactggtaccggtctgtggcgtgttaggagctttgctgcacagcagtaggtgagcaatgggtgagtgagtgttgctgcctgagccctgcctcttgtcacatcagcagggcattagatgctcataggagcgcaaaccctattgtgaaccgcatgtaagaaagtgagagctgcgttgcacactccttattagaatctaatgcctgatgatctgaggtggagcagtttcatcccgaaaccaaaccacaaaattgtctttcatcaaaccattccctggtgccagaaaggctggggaccactgctataaattgctgctgtcaagtagtgttacgcatggtggtctttaacataaaaaaaaaaggtaatgaacgtacaccacacagattagcaaaaataaggaaaggctgatctagtagttcaaacaagcaatcctcttatttaatggttctgtgattgctcgtgtaggcagaagcttaactgtaagttgttgcatttgacaggcaaatgtagctggagctggaatgtagatattagtgaaattgtgatttcagtttactggagccattcagtgggagcatgaagtgggttacatgattacacggatataaataaagcgtcctccttgccacttcactgctgttaaagtctctcctgatgttatgtggtgaaaaacaagtcaaaaacattaattctgtcaagtttccaaagatataagaatctttgaccagaaaagagacggtatttatcttcaaatttaacaaattgtgatgaaatgctgctgttacagaacctagtgtaaggtcgtggagtccattcagccagacacatgtaattttgattattaactgccgtttctgtggtcagtcggccagttttatatatttcacattataggtatttggagcaaagacagtgttgtttattgtttactttaaaaaaatacaatactgtaactacataatgagtaaatgttgatactgttgaaaactaataaaaacaaattcttacactatcaacatcacagaaattctaattgtaagaaaatattgatataatatggaaatccgttcatttatttggtgcattaattgaacaccaacactatgccaagcattgggatacaaccatgaaagaggccagcttcctgatctcacagagcttgtactttgttgggtggggcagagagcaaatcagtcaatctgtctgtctgtctgtctatctatctgtctatctatctgtctatctagatgtcaatcagtatactctgtgccacttggtggtcagtgctatgaagaaaaattaagccagtgaggagctggatagagacacagtctggaagggtatgaaggggatcagaatatgctacccccaaatatgccatttcagcaaagtactaatttgagctgaagacaatcgagaaatagcagacccaggacaagctttaccccctttttataaaaattttgctgtgtgaaggtatcctccttcccctctccatccctggagagaccactagaggtggcaccatcgcctgcagaaacaaaccttattgaaataacccttatcttctattagtttcccccatatatttaccttaccacacttcccctggaagccctaatcccctctcctttgtcttgtgacttctccacagtttattgctctttgttaaaatggtgtgtatgctctcaggcctaactgcttcttttgggtttttgcttttctgtggagctccctcctctcccctccctcatgtaaaaataataacattaaataaaatttgtgttttttcccctgcgaatctgtctcgtcagtttaattggcaaggcctcatgtgctgaacctaacagggtagagaaaaaaggtttttttccccttttctacaagtattaaacctggagagaacaatacagtgtaaaggctgtgaggtgggagcatgctggggtgttggaagaagcacatgagcttacaaacattccatcaatttgcattcattccaaaaattgtatgcaatttttcagtgacgattcccattgatcaatcatttataaaaactaatggtgagggtcttccatactcagtttactcccttcttggaaaagaatgtacattttaatcaagatgatttcatgaaagacattctgtactccaaacatttaaaagagcgtttagagtatacagcaattcatcttttcttctgtattttaaaatttaagacagggagaattattgtattatacttagttcagatttggtggtggttttgttttttggttccagtgaaaagaaattgcatcagtaacctggcggtcaaccgtgccatattgtttgtgatttattagtctggaaaaaataactgtatttctggcatatgtaaaaatagtttgctgagaggcctccttggttgtggcaatagtaatactaattaccaggtactgtatgtagctcattctatgaaccaggccttgttgaaaagtgctttcacttaattttttcttttcagcagcctgtgaggtacctactgttatccccagctgggagggagctggccagtggactgggtttaaactatgttttcattgtctttactcttaaccacttatcttctctgcctccagcaaaataagtcaaagagttcagccagtgtttcttcttggactaagcagtcagcctcctaagtaagcaagccttggaatgcaattgattggtaagatactaaagtaatcagtaaggccctcagttcctggctgccagcttctttcaccctctcctgcaggaagttctgaatgctgatatctctacttggtgtcttctctccccctcccaattccattatttccctttttctcaatcccaagtgaaggaagttctgagtgtggatgttggagtcattcagaccttggatctgagtcacaactctttcaatttactagaaatatgactgcaagaaaatgatgtaagcttccctaaaccaatttccacatctacaaagtatctaaatagattgcttaggagaaaaattgaattaaattgaataaagtgcaaagcacagaacatggccaggagtaggccctggatgaatgagggaaaaatggttctgatttttatttttgagcctctttgtaacatttgttggccccttcagaataatccttagagttcatatcagccacccttcatccctcctgggatgggccaggggagaggcccagttgcctgtgacactgcttcgtttcacatttcactgctttagcatctcaacatttcattgataacatttttgatgcctgaaaacagaataacttatttgtaattctacatacattttgtttgtgatcaagttgttagagtttgaaatgagcctcatttccttgggttttgtccctccccatctgaccttcctcttctcagtgaaccctgaagaaaaaacactagcaaaggaatctcaagaatgttggttcgggacacagctctctccatctactctcctgccctagtcctgcccctccttgtgttttcagcggtgaccaggcactggtgacagccttggctgcttggaccagctggaggtagctgcaaaatgcctgcctgctagctttgaaaaatctctgccaacctcattgaaataattgtttaccacatatcagaggggactgggaagtgggtaattgagagatctttttgaaggggtttgtggcttctccacttgcagaggcttcctgaaatggtgggtaatgctcatgcctcagggagaatcaatatccttctcctaaaacctgctcacacgtagctctaagtattagacatgcatttttgttaacattttatcagtgcatttttctacctgtgtcatttggaccttagattcgggagaaaatcactgtgtatctttggtggtttcaggtggctcttaaatttcattaattcacaaaatctgaattgaatggaatagtctgttttgggaggtttttttgggggggttggggagggattggatttttcagtccttccaagagacttcaggttttttttttgatgttctgattagcccggtgtgtgtaaggccctatcaggtgttcgcctgtgtgatcctatcacacccacatcctgtagctgcatccaagtgctttgaggccgacttaatggggattaacttaacagttgctctgtgggaacagatgctctttgccgcttatttctaataaattgattgagccatttaaaagattttttttttcttttaagttacatcttcttaagaaactgtagacaataaagcaaaactaaaatacttgggtctaaaattagtgtattatatttaaaacactgggcttcagactgattatatcatgctcttttactgactttctagtcagatgcttatttataaaaataaagcttatataaagggcagcattcaaatgttacaccagtcggttttagcagtttgaccttccacagtagctaaatattttttacactgagagaagaattctttaacattatatgctatcagcatgtcaagtgaattctgagcttgcatgcaacagatgagaccctaggtggaaacataaaaacataccagtgtgaaagagaaaagcaggctctctgtctttgggaaggagttctgcagggaggggtgtttataagtgtagtagatacttaggaaaattaatacaattattataaaagtcatctgggaaaaaccattaggtaagaatagccaataaaaaaccagaagcaaaatgtaaagatatagaaattaaaactgcacatcccatgcatagataggtcaatggggcaaactggaagtctagaaataaagttgtgcatatattggaaattagtgcaagataaaagtgtctttttacatcagaaaggggaaagatggattatttagttaatggtgttgggttatctgactgtacatagaaggaaggtgggtaattatttacccagtaccaatactggattacctagtattatgtacccagtacagtttgtcagcaacaaaaggcaaacttttttattccatgaagtgttcttacaaatcagtaagaaatactaaatatgaacatcttcagagaaaaatgaacatttttgaaaacttattatgaaaagaattaaacatacacaagagagaatagtgcgctgaatgctcagcaatgatcagctctcacccagtcttgttttatctgtattcccctttctcaacctgctcaattctcttttccctcactgggttattttgaaataatttcaattctataattttatgtataaatatttcagtgtggatgtctaacagaatctctattagacgtggacaaaaaaggcaaagaattttatagtacacaggaaaaaatacacagccaataaacctatgaagatatgctcaatctcatagtcgtcagggaaatgcaaagtaaaacagtgatataacattgttttttaaaaccctgatgggcaaagactaaaaaggcttgccagattggcattttcatctactgtcaattgataacagatatttctttgcttggagtacagtggcacagtctggactcactgcaacctctgcctcccaggttcaagtgattctcctgcctcagcctcccgagtacctgggattacaggtgtgagccaccacgcctggctcattttttgtatttttagtagaagcagggtttcaccatgttggccaggctggtctcgaattcctgacctcaagtgatctgcccactgcaggcatgagccgctgcatgcagctggtacagaaattttttagatcagtcatttagaattttatgtacatatcccttgatctaggaattctagaaactaattagttcatagtatattgtataaatgcgcacagatgaggatattatgagagcattatttgtatcaactaagcaagcctttaaaaaactcttatacagtagaatattatgctgatacattaaaagtgggcataaccatactgatgtatagaaatatctaaaatcataccgatataagtgaaaacattcagaatgcaggcataatcacagattaaacagtaatttatataaaaaacagaaaatttatatgtgtattatgtcagtagcagattcaagtgaatctgacaaaatctgactctgggcaatgagaacattggaatggaggagaaggtagtacatatttactttgtatattatcaccttttgtactatttgagtctttttaactgtacgcagatactttagagcaggggtccccaacacccagccatggacaggtactggtccatggcctgctaggaaccgggccacacagcaggaggtgagtggcaggcaggtgagccagtgagcattactgcctgagtgctgcttcctggcagtagattctcacaggagcacaaaacctattgtgaactaaacatgggagggatccaggttgcctggtccagtccttgtgagaatctaactaatgtctgatgatctgaggtggaagagtttcatcccaaaaccatcccatcccatccagtctcatgccatcccacccccaacaccccatggataaatggtcttccacaaaaccagtccctggtgccaaaaaggttagagatcactgccttagaggctgctccctcttggcacatcttgaatgtaggactccttggttctgccattcctggtaggtagtcagccagcttttgatagttctccccagagacttcatcccacaggcaagccatcccattccacgtaaaacatctctaatgttaggaaggcacgtattttgatgtgatatctagaatcctcccagctgttcttcagaggaacattacttttataaagttgaaaagaacgttttattgtattataaaactaggtcatttcagtgaatttcatctattttcatgggtaactgattcttatatcaaaacttgcttttgaaagtactggaagcataaattattacttcaggcccatttgctttactttgttcagcacattgaacatcaaggagcaactccctcgatctaaaatttctagcattggtgcttgtaatatcatttttcaagttgacattaatgctatctttggaattctcatggtaagtcagaagaaagcagtttagtggaactgttctttctcccactgaattgtatactgagatctgttatattttctgcattttaacccagaaagttgttcaagagaattgaccatgataagacatctgtagcttattttgtatttttttaatggaaaattgtaactgacttttaaatttaagattgagtgtagcctttcccaaaccaatagctaatgtttttataactatttagtgtaggagattataataaaatccacattgcttaagatataaaatgtttgtgcagtaataggctgtataaaaacagtaaattgagattgtatcaggaataatgtattataaaccatatatgaaaccaggtactaacttggtattctgcatagctttatcagaaaggcagagcaaatactatctcaaaatgaagtataaacaaaatgaggttcagtgagtgatgtggtttggctccatccccacctggatctcatcttgaattgtagtccccataatccccatgtgtagtgggagggaccaggtggagataactgaatcatagaggcggtttcccccatcctgttctggtaatagtgagttagttctcacgagaactgatcactttataagggacttttccccccttttgcttggcacttcttcttcctgccaccatgtgaagaaggacgtgtttgcctccccgtctaccctaattgtaaggttcctgaggcctccccagccatgctgaactgtgagtcagttcaacctgtttcttttataaattactgagtcttggatatgtcttcattagcagcgtgagatcagattaatacagggaggctacataatttgacccaagtagcaataaacaataggggtgaggttgaaatccaggcccctggtacttatggccttaagctaagtgaaataagccagacacagaaaaacaaatactgcatgatttcatttatatgtggaacctaaaacactcaaactcatggaaacaagagtagaagggtggtgttaccagggtttggatgtgggggaagtgaggcgatgttggtcaaagggtgcaaacttgcagttatgagattaatacctaatgtacagcctagtgactagttaataatagtgaattgtacacttgaaaacgtctgcgagagtaaatgttaaatattcttaccacacagaacaaaaaaagtaactctgaggtgatggatatgttaattagcttgattgtgataatcatttcacagtgtatacatatatcaaaacatcacgttgtatacattgaatatacataatttttgtcaattatacttcagtaaagctagggaagaataaaagaagtgacctaaccaggacacctatctgtagctctatggtaaagccaaaagggataataacttttgattatcaaaacttcatcatcattattattttttaagactgggtcttgctatgttacttaggctggtctcaaactcctaggctaagtgatcctcctgccttggcctcccgacatattaggattataggcatgagccatcacacccagccagttttgaaggtatctttattacatttttttgtttaaatatttaatagtaagtgtttaacttgaagcatttttttctgccttaaaattgattttcccactcattttatggatcaaaactattatcagattttaattcccactccaccacattgtttataaaagttgacaattatggaaagtaaagtaatactgaatttttctaatgcctatctttgacatggaataaagattataaaatttcttataacttgaatgagtttttaaaaattggacatctttttataaaaatctagcattgaccatttcaacataagttttacttatctctgaaatacaggtagtacctatttttattaattttcttaagtgatgctgagtgacactatttttgttttttttcactttttctttactttttttttgagacaggatctcagtctgctgccaaggctagagtgcagtggtgtggtcttagctcactgcagcctcggcttcctgggctcaagcgatgctgccacctcagcctcctgagtagctgggactacaggtttgcaccaccaggcccagcagttttaaagattttttgtagagatggggtcttgctgtgttgcccagactggtcttgaactcctggcctcaggcgagcctccgacctctatctcccaaagtgctggaattatagacatcaaccaccgtgcctggccccagtgacactgtcttaattttgaatagggaagtatctaatggtattaaaatggtctggcagagaaggggatatgaggcttggtgaaaataagcacaggatgcaccatctttgagtaagtgttagtttctgcagtgagccagcagcaacattcttagcagagcctagaaagatcgagtgagggctgtgtggtggtgcagcctcttaagtctctctggttccacaacatgctcagattggtggctttgatattttctccatccaggacgcattgtgctaagcttagggaaggtccagtggatatttaccaagcctcttatactgccccgcatgttgccatgagacagcagcgttatcaccttaaatggtgcaaatactccttgtgcataccctacccctgagatctaacatctggattctggatactgtttcctattcttccatcttgctgcatggttcccaggttatgtatatagtgtggctaggcaccacacatggccctggctccttgcagccatacagaggtgacctaactggatgtaattgggtatgtaccgggtgttggctacctgtgcaggttgagggccttccacaggtctagcaaagcaattcattgcctttctgaatttttgaatgcttcatttgtgaaacccttgatgtaataactgttgatattatttctttttgaaaactccccttactcttccctgtttcttcatttgtaaactggaaccgatagaaaagtaccaaacttagggttgttgtgaggcgtaaaagaaataatacagcccagagaacatagtatatactcagcaagtatttattaatatgactactaagccagcattggtgattgattggctcatagtgtcttctatttgccagatgttttcagaggctctgttcatgttcatacccatgtttgtaaatgacagaatgtaaatttcttaatcctctgtcttctcctttagcatcagctcttgtccccaaagtaaaagaactcagtcatccagaacccagttttgtagatctatttttcaaaattgggcagttaatagaaaattaaaagcagtctagggaaaagcctttcctttgggtttgttgctttcttttctgtcataataagactgtgcccaaactgtagggaaaaatcaagaaactgtaaaatacatcatcagggtgtttatagtaaatgtaaaacgttaagtaacatttgagttaatctgtgcttgtacaaacctcagaagcttaaataatgaaccaatgacatataatttagaaagttttcattagactctttgcgttggtatttgcaatatcagatttgcatgtcatcattattagccttcctctattttgagtgttgactaggtgccaggcgtcatgttgagaaatttatgtgcttatttaattctcacactgactccatgagatagatactccattttacagatgaggaccccacatcataaccttttggccagaattacagttagtgttagaatttaaacctatgcagtctcattccaaatcctctgtctttactcctccagaatgctccattaaatgaattgtttcttataatccggttgttttaacgttggaaaagaacttgagaacatttagcccaaccaccctatgaagtttggcagtacttcttgccattctttcaatagataatttatttgagtttaagggagagtctatgaattaacactagtaccaaaactcccatgagaaaataatgtagacagcttttgttaaaaaagcagaatttttaaaggtgttcattcagttatcttcttgcctaacaagttcctgtgttgtgatagactttgaatttgttaaatatgaattggcttcctgattctagctgttttgccagaggcctgatttagagaagggattaaaccactggtcaaccttggatggaatttgggccagcagttccttctccacagcccctgacacttggctttgtgccaagaaaatcctacaaaaggaaattgatttactctacccaagacagagttccggaggctttggttgtccattgttagcttagaagttggcgcagtgtgcgtgtgatccacgcctaaatagcacagccttgctgtgcgtggtagaagttgggttagtgttgacatgctgttgactcaccctcccgaggatggaagctctggcctgggtcaagttgtggtcactgcagttaacagtttgttgatctcagggagtattccacagttgctgatgtaattgacaatgattggagccagctcttccccagattcaaatggaccaattagaggacttgttggttctgtttatcaactatgtaagtgagtactgtgaagttggcattgtttttagtctgtatttgggtaagatgaaactctgttctcagacagtaatatctttcaaaagtacaatgttacttattgtgaccaaagtagggatgaagtttgcaaattatttggtgtaatgatttaatttggccatccatgcagtgcagttctctaccagtgtgattgttctctttgtaaaatactcttactttgccagaaaattgtttgtttgtttgtttgtttgtttgtttgtttgtttgttttgagacggagtctcgctctgttgccaggctggagtgcagtggcccgatattggctcactgcatccttcaagcaattctcctccctcagcctcctgagtagctgggactacaggtgtgtgccaccacgtccagctaatttctgtatttttaatagagacgaggtttcatcatgttggccaggatggtcttgatctcttgacctcgtgatctgcctgcctcggcctcctaaagtgctgggatacaggcgtgagccactgagccctgttgaaaattcttattaataagatgtttctcatagaatgtttcaaaaaattgtgactggtttcaaaatcagatgatttgcaagaattagccatagtataaacacatagttctcaaaccgttttctgggagtgggcccagagatctatttaacaaaaccttgagtagagtctggtgcaagttaaaattggagaaccactaatgtaaccttaccttatctgtggaccacattttgagctttggaagaaataaccctttctatccttcacaaggtaacagatgatttttttgcacaattatttgataatgagcttatatttgagattaaggtatgcacacgataatgtacattctcactctaggtctggggaccttgattctttgactcttctgtccttttctctccagttacttggttttgtgcattaacaaacttttcaatttacttatttttttttacttatttacttatttctcatcccttacgtaatgttgcatcattgttttttgtagcctctgcagttcaagatactaatcacccctttctaccacattaaaatacagactctacctaaaatcatgtatgggagtaacttgatatatacgaaagtgtaaccgtgtcacaattccccgccccaccccgccagtctacataaaactgcaaacactttattgcttaccaagaaagtagacaataatatcgaagaaagccctccttttcctcttctttgaccaacaagggagcagttcctgacaaatgtcagtttgctttttgagttccttaggtttctgtgttgtgtttgcaatggataaatattgagtaacaggtactgactgtattgtatacattgaaaactatccaccaacagaatatttgcaggaggattttgttttgttttgttttgttttgttttgttttgttttctgagacaggctatctctctgtcacccaggatggagtgccatggagtcatcatggcttactgtagccttaacctccttgtctcaagcgatcctcccgcctcagcctcctaagtagctaggactacaggagaggaacaccatgcctggctaatttttttttttttttttgtagagacagagtttcgctgtgttggccaggctagtgttgaactcctgggctcaagaaatctcccaaagtgctgggattataggcatcagccactgtgcctggcttgagaatgacattctataagtagtttcagtcccttagtttaatcccatattttgatcctataacatgtacaatatttgtgtatagtatatgatctgccaactctctaagaagattttaaaacttattatgttaaatttcagacatatacatcatccagcttcaaaaattgaccacattttgctgttcttgtttcagcacctccccctgccccattttcttttctgaagcattttaaaataattctcaggtatcatatcattttacttctgttcataggtttctgaaaggatttgatgcagaatgttattattaaaccagtatacagagagaaaggccactggatattagtacatgttttggtttcagacggtccttttaagagtatattaaatcacataaggattttctgagtacccattagaaccacaaaaaatacctatgatacccttcttactgcagtagaagatgagtttcctagggtagccctttgttgatggaacaaacatgtattttgtttcatcaggaaaatcattggaacagccatgactcagatccactaaatgaaggaacaaaaataggacctgcctcacctcctgatttttttttaaatctctaggatgagtaaccagaatatttttatgttgtgctaagtaggtttgtttgtttgttttttactctgacttatattatttgaattgtagaaatatattgtttttacttttttctttaaaattctatctggagtttctaaatgagagattgtagctcctaaaacctttcttagttttggtgtcttgctttctgttcttagcgtctgtggtcatttctaactcccagtgaggaaagagctctctggtcttgtttctttgttaaatgaaggagcaaacctccgtctcgttgatccactcccaacccacttgttttgtaacaatgaaagttatctcatacttaaaagacaacttgaaattataacacacctgtaacaaagtaaagggtatgggtttttacttaggtttaaaaaaagggcagtaacccttttcataaaaaagcaaaatttagatgggatagaacccccgtttatagaaaagattttaaaatctcatttgctctcattgaaaccttaaccttctctcaaatactggcgcacctctgaggaacttcaaatacggtttgaaaactaatggtttaaggagggccaggcgcagtggctcatgcctgtaaccccagcactttgggaggccgaggtgggcggatcacttgatgttagcctgggcaacatggccaaatgctgtctctactgaaaataggaaaaattagctgggtgtggtggcgcatgcctgtagtcccagctactcaggaggcggaggtggaggcgggaggatctcttgaacccaggaggcataggtgcagtgagcagagatggatctcttgaacccaggaggcataggtgcagtgagcagagatcgcgccactgcactccagcctgggtgacattgagactgtctcaaaaaggaagacgaatggtctaaggaaactagtttgtggtttctcagcggagaatgacattctagtttctacagatctggcaacagaagacaggcacataaactggcctgctttggagtcagggccaagacttaaatccagatttaaaaccagctttttttttttcttcttctaaaacaaccaacctgtgttttaggtccagtgtctgccttgtaagttgctcaaagctcagatacaaggaagtaatcagcacacatttttgtgataacattcctgaaaagaaaaagatgaggtggactaaggtaaatacactgctccttaaaaatccatatttttagattatttataaatcaaatgggcatggttaccaaagatgaattctagaggtgtaaaactccagtcttatacctcaaatttcagttttccttagggagcaaaacacttccatgatcttactgaggacctaaaaaagcctgtacatattttaaaaatagcactccctagataaagcctgatggatccagggtacagtagaatcatgaaattgcctgtttctttttaaaagatgtatatgattgctcggtggctgtatattgtccatcgtgtgcgtgcctgtgtggtatgttggttctttcagagaggcagtggcgtgcagagtgagaggatcacagatgtgtatgtgacaaaactatttcttttctttcttttcttttctttctttctttctttctttctttctttcttttctttcttttcttttcttttcttttcttttttcttttttgagacagagtctcactctgttgcccaggctggagtgcaatggtgtgatcttggcttactgcaacctctgcctcctgggttcaagcgattctcctgcctcagcctcctgagtagctggattacaggtgtgcaccacgatgcctggctaatttttgtatttttagtagaggcagggtttcactgtgttgttcaggctggtctcgaacttctgacctcgtgatccgcctgcctcggccacccagcgtgctgggattacaggtgtgagccaccgtgcctggctgacaaaactatttctaaaacacaagtccagatattcctaccaagggctctctggggcttcgttttgatttatatgcaaaacactcctaatgtggtgacattggggagataaagatctgggatgatgagagagaaaggcaggtaggacacatgcccttccagtaactttccagctagggcttgcatttaacctctgatggaggcctcaccatccaggcagatgtacttgcttaggaatgagtttgagataataaggctaaatgtgctgccttctgtatataatttgcatttgtcctaatgtacgactaaggaaatgaaaaatcaaagtttgagtgactaaaataaaagaggtctgtggagtaattggattgaatttgcaccaagtcaaggagaaaacttctgtattttgtatgttttgtcatggttctatgattacttgttagaaagtgatataaaattcaataacttagtttgatatgaacttggctatctttaagttatagaagtcgtgcatataatgtggctgttttcaacccccataccctttctgagtggttggagatgtcttgaatttcgaagtgagaaggtctggtgctgttacatagataatcatgttagccagctttaccttctgataagctctcaatttaagaaagtacttctaatcctggctttatctttggcttgctatcttattatgcacagagcataattgtaagaagggaataatatctcttgctgtctattcactaagaatagtgtgaggacagggctcttaaaaacatgaagagatgggcactattgtatagatatagagatttgatgaaatgttaaaatgttggatgattttaaatgacaagtggagtggtgagaagtttatttttaaccttatgtggataccttggatatttagaaacatcgaagttttaaggaagaacaaatatcttgactccaagaaaatggtcatgtgatactgtggcatctatttggtcttcctgatgtatatgtttcctgacatttagctcctaaaatccttggaatctccagtgctaagaaggtcttatatgctaatgagatgactggtggctgggtaacctaccatgtgattagagggttaggactttcagtcaccctccccaacctccaggagctgaagtttgagttgataaactaatgatcaatgatacctacataatgaagctttcttaacaaccctgaaggaccgcgttctgggaacttccagatagctgaacacatggaggttcctggagggttggatgtcaggaaagggcatggaatctcgttttctcttcagccgcacctcaccccgtgcatctcttccatctggctgttcatctgtgtgtcctttgtaatatcctttaaaataaatgggtgaatgtaagcaagtatttctcttagttctctgaaggtgctccagcaatgaatcaaaacgaagtaaggggtctggggaatggtagccagttggtcagaagcacaggctacaacctggggcttgtgattgacatctgaagttgggggagttttgtggtactgagccctcagcctgtgggatgtgtaatctccaagtacagtgtcagaatccagttgaattagaggacactcagctggcatccattattggcatgcagtattccttgtcatgagcctgggcaacatagggagacctcatctctacaaatatagctgggagtggtggtgtgcacctgtggttccagctactcaggaggctgagtgggaagatcgcttgagtccaggaggcaaacattgcttctcctccaaatgctgtactttaacatgtttggaaactcctgcaaaggaatttcaacataagcgaagtcaatgggttataaaggactgaatgccattttgtaaatgtcagaaatcaaagtcacaaccaagttaagttctagattagggccaggaagagaaatgtattatctggtcaaccatatcaaatctgtattttggtggaagagcattttcttatattggttctgattggtttgatacggacagggaactgttttctttattccagttatttgttttgttttgtttctgagacagagtctcgctctgtcgcccaggctggagtgcagtggtgcgatctcggctcactgcaacctctgcccctcaggttcaagcgattctcctgcctcagcctcccgagtagctgggattacaagcgtgctgtagtttttgtatttttagtagagatgaggtttcaccatcttggccaggctggtcttcaactcctgacctcatgatcccacccgcctcggcctcccaaagtgctgggattacaggcatgagccaccgcgcccggcctattctagttgttaatcagttaacatagccaaaagatatagaataagattgtagactgaatccatagtctaatgatttgtcttcctagtaattgtgaataattcagacattcaaaattagtctggcatcatacaaacattagactagtcctaaaatgaggatattggcaagtgtgttaataaaaattgcatatgcagtattaataggttccttacgtaggctgccgattactcaggaactgtcagatgttttgttttgttttgtctttgagagatggggcagggttttactctgctggagtgcagtggcacaatcttggctgactgcagccttgacctgctgggctcaagcgatcctccctccacagcctcctaagtagctgggactacaggcatgcaccaccatgcccagctaatttttgtatctttttttagagacggggttttgccatgttgcccaggctggtctccaactcctgagctcagggatctacccacccatgcctccctaagtgctgtgattacaggcatgagccactgtgcccagcccccagatttttaatcttctctttgacattgagtttcagaaatgaagtataaatggtgaatttttagtgtagaatatgatgcactaggaagatcacttacccgtttattcactttcttagaccatgtcaacccgattctgaatttagggttctgttgtgatggtgttctttagaagtgattttaacactcaaaatactatagtctgtaacataatttactgattttttaatttttgcaaactaagttgaagtaatcaagtatttatgagttctttgggtgagaccatctgtcaaagaattctgggcttaatggagatacatatatgttgtgaatactaaacagatatccaagtaataaagcagaaatcatatgctgtgtaacagaaatgtaaagttctgaattagttcacgagtaggagagaaacttttttttaaaggtagaggagaactaaaagtaatttcttaaaagagtgcctattttacatcttgaatattaaaagtctaattcagtgccttgggatcttgttctttttgtagattttgatttgaatgaacttcagtttgctgaaatgtctaatgggtgcaaagtacagatttaattataaggttgagctaaaatcagaatttaagcatatggcatatataataccaatttaatctttcccccttaaatttagttatttttagtgagtcccaaacaccatatttgagacatcacttttttcttttttaaagagatagggtctccctatgtgaggctggagtgcagtagctattcacaggctcgatcatagcaaactacagccttgaactcctggccccagtgagtgtaatgtctcaccatgccaaagtacttttatcttaaattgcttatttttttgtttatttttttaactgactctgtttacaaaattaaccttttatctagtgacagctagattgtatcacatttgtcatctatggacaactgatttttagttgtttaatatggtaagtttattattgtttttccttatttaagaaaacaggatctgagtgaaaaaaaaaaaaatcttaattcaactatcacgattccagtaggaagtagacagacattcatctgtatacattaggtgtcaaagtagagttttgtggtttatcattctgaagatttgagattcaagacatgactatctttcagtcatattgtgcaatagataacatataatgtttctcactgatgagaacagttggttagatctctcagatgacttgaattaggtattagttcaagtcagttgtcagtaagtttggctttatcgttcagaggagcttcttatgactggacatttctcaagtattgccgtattggtcatttggctatcaatgcttaaattatactcagtatagtataaattttcttatttcccttatttaagcatgcctccattacactgttgttgtctctaataagagtttaataatctttgttttggcttagtaaaaagagccaacaaatatatgagtgactgactgagtgtattgctctatgcgcaattgtcttaaaggaaaaacgtttatagaatcactgtgaacaataaaatggttgcatttcgctggaaaacctcggtgctcctttggtaaataatgaagtgttttgttttacgggccttttcactacttcattgacaacagacctttttttttaaattaattaattaatttatttatttatttatttattttttgaggtggcgtttcgctcttgttacctgggccggagtgcagtggtgcgatcttggctcaccgcaacctccgcctcctgggttcaagcgattctcctgcctcagcctcctgagtagctgggattacgggtgagtgccaccacgcccagctaattttatatttttagtagagaaggggtttctccatgttggtcaggctggtctcgaactcccgacctcacgtgatccacctgcctcggcctcccaaagtgctgggattacaggcgggagccactgcatctgaccaacaacatatatttatattacccagtaataggcatagtctaaggaagataatagaatttattcttagtagtgaactctttggcttttgaagcagaatttttttttctttgttcttttctgtgatagtaaggaaggaaggaagggaaggctactactaaaaatataaattgctaaatagaagtcaagtctctgggtgttgaagctcacatattggtgctgtccagacctgacgcatctagaaacaggaatttgcccttagcgtaagcttagccaaatggttgagtcatttctaagtattttaacattatagaatgccttaggaaatgtcatgaatatctaaaacaggtcttcttgaggattttattagtttcttaaaacatggaaaggaacttgattctcagtgctggtacctaaaattcaaagacattagttgtgagttgctgtgctcctcagctctaagccacagttgtcatggccaagcctgtctccttatggagagtggccttgctgtttcctgcagagcttctcttgtgcctggcttgtgcctggaagtcagcgtgtcaccacttcagagagacactatagaagcttggtgatcttcaaacaagaacttaaaacaaagaagttttctttcacagatatcttaaaacttgtagctaaataaaacgtgaataactgtgagagcctcattacagcaatttttaaaaaagcagtacatgttttgttgtatcttaaacatcacagaatggtattgtgtgtccagttttgtttgtaaaatgtaaccttcgtgtgaatgaccatctattcctttctttttggaaggttagtttgtcagctgttgtgtgatgctcaacattttatgtaatgacatttagcacaacgtttcaatataacatctcaggaaaacatttaagaaatagtgaagttctctgggtattacattaatcatattaattacctgttgcttttaatttatcaccgtatcaccctaatatcacaaggcatgtgtagtactattttgtaaagattttctaaagaccttccctctataggaaggaaaatttaattcagaaattgggctgaactctctttcacttgtgtgaaaatgggaaaattagaagtaatttgtattttttattgtgaaatcagtgtaggaacctgtgctcgtatcatggaaacaacagcactaatgtttttctcccctcgggtgtgggctttgctgcagatatccatgtcttctactttttctgttcttagttcttattcacttattgtctatacttcgtgtcactttattgaatttcacaaatgcaatttaggaatccagggatgtgataaaatttgtgcatctgcttgtcattagccatctcacgtttatatcgctaagtgaaaatttaacttagtttggaacaaaccaccatgatttagttcacctgtatagtttaaaagacctaagacctgaaatttttttttttttttgaaacggagtctcactctgtcacccaggctggaatacatggtgtgatctcagctcactgcaacctctgcctcccgggttcaagcaattctctgcttcagcctcctgagtagctgggattacaggcagctgccaccacgcatggctaatttttgtatttttagtagagacggggtttcaccatcttggccaggctggtcttgaactcctaacctcatgatccacctgcctcggcttcccaaagtgctgggattacaggcgtgagccatggtgcctgtccaagacctggaattttacactgcattgggaccttataaaattcttgacttgtacccttttggcattttctgaatgctcatgatttgcttctgaaatattttaggcctttggaaacactccttcattctaatcctctcttttcttgctctcaattcttcatgtcatgtaattattttgcctagagccaaatctgatgtgttattataatcatcatttctgcaggagcttggtaacactcctgcttttgttccctttaaggcttcttttggttttgtttattttgtttcactcagaatgatctggttaagttttgcttgatcatccatttcaaatctcttagtacatttttcaaattcagttccaagcatgttaaatgtgtcacaatggaagtggcccacggtcaaatacattttgggaaaccttggttttaaaaaagttaaactgacttcattattacggttttttttttcaaaagcctccagtatccatcttgaatgatccatttcccatatgtgttttatgacagaattctccccactcccaggtaataactgttgacattttctgaaaactgtttttgagaacactgaattagatatgaaatgaggcatttattcatacttcgaaacgaatgtcttaaacctcactgggccattttgagtatacattactagtgatatatttaataacttagtggtataagcatgcaataacaaatttcttacacaagagaagttctgtgtagaaacaaatttaatactgtggctaaagaaatgaaccaaaaaaatttaatatcttgaaatttgcttcttagctctgtttagaatcattgtgattcacggatagtaaattgtcagagtggacttcatgaaccttatatcagacattctgaaaagagctaaaattgccattaaactgcatgagttaaaatatcttagatagtttaaaaatactatgtagacttggtgagtcagatctgccacactgagcgtgtagctggggttgacgacacacgtgttgcagtgtcgttaccagtttgtctcttttagagacaacttggcaggcagacgtcttgcagataaacaaggaaagattgtctattttaaatggcataagacattctttaaaccagtgtgtcatatgtggttatatagtcagcattttctttagtgcaggaaatcctctctcagggttcctgaataaatagcaggtatctttgtagggatagctcgcaggagatttcaaatgctgtgtattcatcagttcaggctccccagatgtcttacgaacgtgctcattttagttttcttttcttttccctcttcctgctagatacaagttgagacaatatgattagctcttaaagtgcttactctccattttatgtatattactgcattttaatcctcataatatcctgtgaggtgggatgttactatgtccatttgagagataaaggaaatcaagaggtaaagttaactggctttctccaaacagctggtaattactaaatacagaattgacttttgccttttgattccaaagatcatattggtactttcatgtgtgggtcccttcagccagttcctacagtgaccctgacccagctgtaagtcccctgaggtctctagagatatagacagtgatggattagaccctgttcatagttgcagatacaagacatagagaggtttctagcaataatttttttagttatatattttcatagggcttttgatttatgtaacctattagtatatatttgttattccagtagagttaatacattattcaaagagattccagtttttaagccttttctccgtttgtctaagttgttcattatgaaatgattggctagaatttgaaagtctttacctacagagagattctgactggcttgcttggtcttggaaccctagttatgagtgcattgtcttgcttcctggtgaactttgcccagaaatagttaccacctcattttttttttttaaatgaaagctggataattaaccctcaagatttcttaattaaaagattactattataaattgacccacagggagttaatacaataaaattatttttgatcattttatatgaaataattatggggcaatcttctgtaatcttgagttgaaggggttatcttgcttaatgttaataacttttgatacaccaactaccttttaaaaattaacgttttttttttttgcttctgtggaagggaggctgtattttgtaggatttacagtttacatagttattgttttatatgatgtcagttggattaattatgttttgagtggaaactctgtttggttcaaccaatatttgaatgctaattttgttctgtgaacaaatagaaatacagagaacagtaagacatgactctttccccctaagtaaaggcttaggttggagttttcaacctgggaattactgacattttgagccaaataattgtttatgttgggtgggggagggcctacagcggaggctgcctgtacattgtaggatgtttagtaacatccctagcttctacctactagatagatgccagtagcaccacccaagtcgtgacaatcatctttgccaagaactttgaacctctacctagaaacagttcatagggctcaaaaagcaaagtggcctaggacccatgtagttaacaagcttaccctgttggagaaccactgcatagctgaacaacatgggtgagactagtgtcagggtaaaggagctcttgactggagattggccgtacacagaaaacaaagtgagtgttatggatatttggggatttaccttcattagggcacagttggttagcgttaggtgtacaccaacattattccctctttagaaacagccatgcacgtaacattttagcacatctgaagaggcacttctattctaattacctaaaattcttattatctagaattacatgctatgaacaacagcagtaaagtcagaagccagaatctatgtgatgttatctgttttgcgatcacagttgtgttcttctcttagtttatttgaacaagtttgtgaaaaaatttttgtgcttatgtaaatactctttgcttagattttttggtagaatgtaaatctttcccacacagtgcaatacccctcctgcccaagggcgagatatagattgtacagtttgttatttctgtgttttagggcttattcctctgtagacatgtcaaaaagacatccgtcgggggtaaggaatgcattagcaattcaagctgataatctgcatggtgagagtccagataattttttccccaggtcacataggcagctctgcacaagtctgttaaacatatgctagttttgaaaattaaaataagttcccatcactcaaggcaatgaaacgtagatgaattgctctgccagattgactcttagaactcctgatgtgatgtggggctagacagaatgggatgtttgctaataaatcagggaggtagtgattgttttccttctttttctcccccacccccgtcaggacaaactcacattctgtagcctggtgcactctaataatgcctgttgaccttggccatgaaagcactctagactcaccccctaaacaccgcaccgaatgtgctcatccttgaaatttacaagccttagaatcttccctacctccactcctgtttactgcctcctgttactcctggtgcttccagtcagaccgtagtcttggctgtgcagtacctttaggagccctcaaaaatgtttaatttcttttaaaatcagaaggaaaaataaagaacaagataataatcatgaatatacaataatgaatccagcctgacttagagttgtctttataccaatcaacagagccctaaaatatagcttttaatgtttttttaagagagaaagaggcccacgaaagttgtcctggggcccccgcatcctcctcatacactggtgggatgctgctcttgcttgctttggaatgtggcagcagctcccagtgacttcacacgtttattacaaattcaaggtcatttggacgctagccttgtgctacctttcatgcttcctgtccgacccatactcagcctgggcatgttttctgctctgatctttggtctgccttccttctccttctccaagtcaaaccagtcactctttcctgagagctcttcggtgtacccttgccagacctctgcattaacactccagcacctttggttagccaatttggccttatttgtgtctccaccattggattatctgtccatcaaggtcaggaatgttttcgggttaccccactgtccccaactttgaatatgttcactgcctggaaaatgtttatctgaatataaggcatcaagccagaacttgcccaaaacttaacctaggactcaaacagctttgaaatcttatctgtgtagagtgggaacggcatgtgtttgataaccatcagcatttgctgttttgcttagccatcaacaatccgtttctatctcttcctcatagtattttcagctgtatttttgtacagcagtcattcacgttaggtgttaggttacactgaaatctctgacaaccagttctgtgctactgaaggcttttagcagcaggattaaaaaaatagttgattgcacattcgaagtctcactgctcacactgtttatgtaattcttggagtccagttagatcatctgatttttaaaatgttgcctgaattacaaaggagttcaggaatgtgttatcaaagaattaggaaattaacattgaaatttattgagcaacatagctaataggttgtcttgctttttaagccttcttgttttctaggaggagcctgaagtccgtggacaagttgaactgtagctggtatttaggaattggtaaagacagaggtgtggatgctatgttttcttttctctgttaggaaattactctcctggtgccacaataaaaaatttcacaggtatctaaagtggaatttattttgtattgttccacacctttgtcaataattacattttctaccttctagtttattactgttattatttttcatgccaggtgtttcttaattgttggcataagtatttattgaatgcttatatgtgggagtgagagagtcaggccagtgctaaagagtagggaataacccctagacagtgaagtaacttttgtcttgtttgcacattaaaaaaaaaaaaagattaggaatccttgctctatatactagaaatgtttgatgttctcttttcttctcttcaaacagagaaaacttagatgaatacttataggctctactgtcaactaactgcaccctcctaatattggcgtctgcatatttttaccattgtcaatatcagattgcctctgatgttgtgtcactgaaactgatagtaacattacatccaagagtaagactgcagtgtgatttttggctcttggtcttctgttctttcggcaacaattttttataaatatagtcaagaaaatagaaataagagtcttcactgctacctccccttcagaattattttctcctagtattgtggttcctgatagcctttattcctatagaaatggcaattcgaaaaattccttctgtgaatctgagggctctacaaagggagagcttctttgatagtgctttggtgtaagttatttaagaaggacaatctacccaggcttatcaagcaaataacctggaatttaaacctggagtattctttagtgttccaagtctgcaggaaaagaagtaatcttggcttaaactaaataagttaacagaatacaatttgaacaatgaacaagaatgctgtttgaaaattatcttgggtttttatgtcaagttaatattctcactgaatttctattatgtttgtaaagcagctttctcctagaccaaaaatcctagtaataaaaccacaacagtatgagagttataagcacacagtaaaggctgatgagtaaatgttatgacactttgaaaggaaataaaccagacgatataatgtaaatatcctttgtgcttatcaaaaataagtgacttcatgttctgttcctgcaatatttctgtaaatctgctaaaaatagaaaggtaaaggtctaagatcataaatctctgatgccctttccttaaaagtaaggaattcttgtcttggattcttatataatatacttatttataatctcacttgttctgattgcaggtggcctcttactatctttacatccatgtgaatgtgtgtgctttgatgtgtacatatgagagacaagaacaaaagtaaatgtcaaatatccgaattcctgtttcagtgagctttcacggagtaaattctttttgtctacttgcctgtgatctcttctaatatgacttgcgttaatgacctttaagaaatcttttaataaaataaaaaattttattaaaatcttttaataaaaaaattttattaaaatcttctaataaaaaattttattaaaatcttcttcatacgtgttacttgaatttactcatggcaaggaccagttagtaccattttatgaaatcacaagctcatgggcttgtgataaaacatataagtgctttaaatttggcattggtaacggcaggccgactcacttgaaaaatgctctgaactgctctgcctcatgctggtgggaagtcagatggaaatgactttctagagagtttagctggcctccaagcttagtgggtactcactctccttatcccccgatagctgctctgagattttaatgcacattgaagacaatatgataacttaacctggaaaattagcattttggtaagggtctttaacttcattagtattttcataccactttggtattagaaattgtaaagatattaaagggtatggacaatgtggaatgtatgtaccagactcagcagtgtatactgactccctcactatagcccagaactggaaatcccgctaactacctctccccatcctagcctgaattgccctctccacctatgttggttttacaatggcctgacgcctgaaagctggtagaaactgtataggaaaatagggttgggataaatttctgggctgacaaaggatagaggaatatgcttctttttccccttgtccaagtatatcagcaactctaagatgcagatttatcagtatggctctactgggcatgttctagttaaatggtagacccactacctcttctggaatcttgttttccattatattcccacctgcagcttttcaaagacttattctcttctctaatggtctcttggttcttttttttgcccatgctctacgttccgagtgggtcaacattgcagtgggtcaatgagaagaaatagaggggaaaaataaaagaaccagaaagaaacctgttaagtttgcacttacttgtgcattaagcatattagcgtaagccttaaactctagaaaactcactgtagtgctgtaaagtaccactgataaagtaaaagttcatttttatgctgtgtcgttatttagtgatgaatatgatattgcataaaagatgaggatctgtaaggccaggcgcggtggctcacgaggtcaggagttcgagatcagcctgaccaacatgatgaaaccccatctctactaaaaatacaaaaattagccgggtgtggtgacgcgcgcctgtaatcccagctactcaggaggctgaggcaggagaatcgcttgaaccagggaagtggaggttgcagtgagctgagatcacgctactgcactccagcctgggcgacagagtgagactccgtctccaaaaaaaaaagatgaggatctgtgtataactgccaggtgttgtgtgaggtaccatgaataacctggcaatatcctaactgtgcaggtatgaggagtgacccccaggaatataattgcaattaaacttgcaaattatgtggggatactctatttcagggcaataaaataaattatgtctagagctcataactcttacacatatttggctaggtctatgcagcaaaacccaggtgataactgaggctttaactttgggatttgtttggtgctgactctgccacatggtgaaatttggtaggatctcagtgcgagtgtcacatgatcagtctgcttgacccaacatgccagaattccatttctcagcccactctcttctctgcatacatacctacctcccggagagggctgggcgggagcctacgtgtggcaagagccctcactgcttttgttacacagatttcaacacatatggcttgatggagtgtgattgcagtagcatgaatgtttggtgatgaaatttgcatgtcctttgctgggagaagtataattataagatttttgtattcacatagccacatgtgaggtatgagcaggaacggggtctatttaatagcattagattgctttcagatttgaaatatttccttttagaaatatattgtgtaaacaaaatatgtttaattttttttaaaaactatgcctttgtacaaattgtttatcatttgcagaggtctaaaaaatgtaggagaaaagaagctcacaaaatcaatcagatctaaagattgcaaagattgattaccatctccttaaaagcttcagtacatgtgtttacagtatcattctatttgcctctgctcagattctttccaattctaggacaacccaaagtgtatagatcataagccataactgatcctaccttacataatacattaaatataaaatatttatggccaggcatggtgaccagttctgtaatcccagcactttaggagaccaaggcaggaggaacacttgaggccaggaagttgagaccagcctcggcaacatactgagaccttgtctctacagaaaaattagccaggtatggtggtatgggcctgtactcccagctgcctaaaaaaaggcaacttgagaaagtttctaccttctgaaacaatctatgccttgattctatcacttagtattttagttattcctatcaaatacatgactgtgttaatttcttttgccacaaaaatgctgcaaagccacaaactcactccaaaatttagtggcttagaacaataaccatttattatagcccacaagctcaagggtcagctgatcccggcttagcttggctacatttgatataaaacagtagaaatttagaaattgaatatatgtagaatatctcttgtaccaaaaatgaagaggaataatagattttgatttttctttgttgtattctgtgctgggtgctaatctgtcctagctgtcagaacaagtagaagccatactggaaaatcatttatttgttactatcaaatttatttcagtgaatgccattcaaaccactctctctgaggagcccagttaccaagtcctccaccttgttagcaacatggacttaaatgcactaattctagaatgagatcttagcaaagtaccagcatttgagatttgtgcaaattgagctcttaaactgtgtgtatatgtgtgtgtgtgtgtgtgtgttcattctagcactcccactacataccatacaagtagctgtatagcaggtatatatacatgtgtatatgtacataggtaggtatatgtcaactgttgaaaaactagaaaatacacattaaataaagtaagggttgataaacattagtagttggaacattgggagatttggacttctactttgcagattcagttggctgcattagatttaaggaaagaactaactttggagaaatttgtgtttgcatttcaggagagatttcttaaagaggaaactaccagaggttagtagatattaacatctagtgatttaaatttgagaaatgcaaattagacatttaagctgtgggtttgcttcccgttttacttgctctaaaagtaatttttttaaaagccagtaacaaagacatgcaaaatagtactgccatgggggaaaaattacttgaaaataatattcaagattgaagaattaaaaaagcttgacatctagtaccaggaatgccagctggcttgttctgtcaaaaagcaagcatgtgctttggaataacactcttgagtagactctaggcgggttttgagcccttctgattatctaaatagatgtggaagtgacttatcttggtttttctgagtcaaatgagataatgagcaaaggccttagtaggtctttgatttttgcctctaaccctttttctatctgcatgttcacaaggtcaaggctgatgagatatggcaatattgagagagtcagaataggataaagatctcaaatactatatatatatttttttttcatttttttttccctttggtgactgtatgagacatgtcagtaaaactttaaagacaggccaggcgttgtggctcatgcgtataatcccagcactttgggaggccgaggcgggcagatcacttgaggtcaggagtggcaacatggcaaaaacccgtctctactaaaaaatacaaaaattagccaggcgtagtggtgcacgcctgtagtcccagctactcaggaggttaaagcacaagaatcgcttgaacccaggaggcagaggttgcggtgagccgagatcaccccgctgcactccagcctgggcgactgagcaagactctgtctcagaaaacgaaacaaaacaaaagacacacagaaaaactgtaaagacagaatgaaagagatgaactttttacatctcgctcatttcatcacatactatatagtatgtgtatggtttcatatatgttagtgtgtgtgtatgtatatatatgaagttaaaagaaaacattcaccttttaagactaaatggacattgactagattgtaaactgtttttgaggctaagagtttgtttgccatgcataaggctctattttttgtaattccacttttatattcatttatatcagtcctagcagtagatgccactcttactgggtcctgcctaaatgcatgcttcaaatgttggttattaatttcacgagtagtgaataacaaagactcctattgagggacctcttgatttcctactgggcaccagcagcaagcatgacttactggccttcttatgagtgggtaggagttttgggtcaacttgagaacatctatcctttgagtagtaaaaaagcttggtattaggttggcacaaaagtaattgcgatttttgcaccaatctaatatcaacagaggccgtgaaaaacatcaagggaggatagcttgtaattagaagccagatcaacagtgacccaaaaagaatttcaggtttccaggagtgaaatatgtagattactcctctgaaaggaattgtttttctcctattcgctttcatggcaaatcattttttaagccgaaactcaagctctgaaataattgtgtagcaaatagtggctgtgaatagatgtggcaactctccacaagggtaaatagaaaccacttgcagtttcagtcatcacattttatttttcttttttaatagcttctctatttttgctcaccacaaatacatgcacacacacacacaggggcaaagccttggaaaattgcaattttccattttaatttgagagacagcccggtcacattaacagaacccttgacggaataggttgaattcccttctctgtccctataaccccatggccttggacatatccttacctggtgccctttcctccctcttatggtccacttttgtgattctgattttaatttcagttctctgttagtgatgaaatgagcaactgcagatgttccgcttacactggaaatacttttttggcatttaaaagaaaaccctacagatgaattattcccctgaaaggggttcactcagattttctagattatgattctagaaaatagttctttacatttgacaatggagaatttaaatgttttaatatgaaaatgtaaagcactcttgtggggtatagttgaattatgcccaggttaagggaatccagtatttatgtcaggaaaccatggatgtgatagaaatagtatcgctacaaagctgggcacagtggctcatgcctgtaatcccaacattttgggaggccgaggcaggaggatcacttgaggccaggagttcgagaccagcctggccaacatggtgaaaccctgtctctactaaaaatacaaaaattatctgggcgtggtggcacaggcctgtagtcccagctacttgggaggctgaggcaggagaatagcttgaacctaggaggcggagaggttgcagtgagccgagatcatgccactgcactctagtctgggtggtggagtgtgacagtgtatccaaaaaaaaatactgagattatgcaagaatctgactcgaagaagtttgaactgattaaaaagtaccaaatacttcattatatgaggccagctatttagactagtcagcgggtggttcaaatgcagaaaacagatggctttcattagccagaaaccttaaaattacataaatccacggatgcaactaagctatggatctgtgccctctccttgccaaacaggacctctcagctagcaaaacagagagctccttgttcacttttccctcctagttgagaccctgttggggaggaatgctgccaagcctgctctataaggaattttgatctcctagatgataacagagagaaactttttggagaaagggaacaccctgtttgaaaggacaacaagagaacttgttcaagaaggtggctttgcatttaattgaaaattgtagcaactgtaggcgtagggtttccagattcacatctgcagactggtccagattaggtatatatgtttatattcgtttatgttatccccttaagcctcttttaaagccatttctaaaaattgctttggaaagtccatttcacttcagtattctttatattgtggctcaaaaatattttttttctggtaacaaaaatattttctttctgtttttaagacttgtagcatttttaagtttgatatgtacgtctctgtagttcagagcacttggtaaacagcctcttgcttttgaggcaatttatgaatgcttcattgtttttagctggttattttgttcattgtcaggaacactgttttcccatgggaaagcatctccagttttatgatgtcagtggcaagtcattcagtttacaagaattaccttcatattcagtcttagaaaagcatagaccacaaacggccagttatatcacagttctcatcttttaaatgttgtcttagatttttgcaaagtaatcttaactcaccttagaatagtgttaagacataaatagaactaaaatgtagtagttaagtggttatatttcccatctactaaggtatttatatttcttttcttttagaaaataaaaatgtttaaaaaattaggaataattatctttaggatgactttgtaagactgtgcttttttactggcagcaaatacctgccagatttcaggtatttggcaggtaaattgaatcttaaaagatttcaattttaagagtgtccatattaacagatcctgaataggaccctgtgtatcatttattaagtcatttcttggaggcttcactcaggaaaagggagttaacccttggatggcaatgtttaatgtggccacatttccttctggctgaatgccagggagtggctgcgcttagcaaccaggctttgtttcataaatgggttatttgatgcaggtgaggatgccgtgagttgtttgtcttgttttaattcagggagacaggcatatgtagtgaaagcatggaattgtttgcagatgggcttcagtaagaataggaaggtttctggttcaatttgtatctccaagctaattgctctgatttccatatacacatctggtgttggttcggggggaaaaaattttacttgagaaacatggcttttgtgagttgatatttatttgtgaagggcctcttgtaatgtcaaatgtaagaagatctatacacacaaccaattttacaatttctaattcaacagcttaccctattattgaggattcgcagtttaaattattaaatgatctccacttgaagaaaatagagcatgttaatcatcacgattctccaaacatttatttttaaagttaatattaaatctcatctggtggaaaacctgacaggaactgaagcatatattttctagtctaaactctcattgttaaaatgaagacaacatgagacagttatagcgccgtaatcaagttatttgaaaaaaatgttttaaaaattaccactttttggtagtcaacatacacacatatgccaacagatggcattaaaaaatggcaagaacatgagacaattatagggtcataataaatttatttgaaaaaaatgtttaaaaaattaccactttttgatagtcagcatacacacatatgccaacagatgacattaaaatagctgtaaagtcaagaagcagggaggatgacaaagtgaaaaatagaagaaatcaaaggaagttaagtcaaaagaggaaaaaaaaatgaagcatttacttggtttgtcaggtagggtgatccagtgtattttgccaaaaactttcctggttttagcaccaaatgtctcagaacatggcagctgatgacctccctcacagtgagtgatcccagagagcaatgaagaattgtgatgcccttcatgaccttgttttggatgttacacatcatcatgcccttcagtgacctttctggtagcaaagggtttgtttttaaaagagttgcagcatctttaagtctaatatatacatgctcggaagttacaccatcatcacttctgctgtactccatttgttgcacagacagaccctgatacattgtggagtttcccagggtccatgaatagcaggaggcagggactattgggggccttcttggaggctggctaccctggggagagaaattgtcaatttcctctccttgcggggaggaaatggaatcaagtgcatttgtattgacaagaaggtagaacgctttccttagacattgtaatgaacagattgtggataaacaaaagtacagagagagtttgaggcagaggaggagactgtttcaacagaatatttaccagctatggtaaaggctcattagtgtctccgtacagttaacaacatgctgccaagactggaaatctttgggacaggaatgaattcggaaggtgaacagaataaagtactgtgggaacaatggcgattccattagtggattgtacattccttacgggcagggccctccatagcatctgatgtagggccttatccacaggtatctgattattatttgactttctttaatgtttttgcagtgttattatctatactacttatttcagtaagattgacaacatttgcatttcgatttctaagatcaagacaatgaatttcctcttaatccctcaggaaagctgtgaaatttaaatttatagagcattctacttagcctgctgctttgcatctgtcagagaatgagaccccccagtttcatggaagtcacaggaagtggcaaggggctcagatggagttgaggggttctagctatttctgcagatgatctggatattttggcatcggctgctttgacttaaccatctggcaatgtaaaggcagaatttcgttaaatattggaaaagttacttgaaaacatggctctagagattttgccagcagcttttgcactcatgacttggttcaatctaagacctgttttgtttttttgttgtaaggacctaagtcctctgttgggttttgacgaagtatgtgtaaaaatgactaaaatggccagaggtatcttattttacatttatgtgggaagaaatgtttggaaactgtttcatttctttaactgaaaatttctcagtgcaattttagttggtgtttttcctcctgtggacagtttttaggaatgatacaagttatcgtggaatcacccagttcttgagtgtgtgaacgaatggcttctgctggaagttaattcttcttggcatgggtgtctcacatttccccagcagctggatttgacaagggagggcctatcatgattaatatgccttctaattgattggtttaataacacctttactcctgtggatatatttttcatttcttgctgaatttttttttctttttgagataccagaacctgttaagtgacacggtatagatatttcaggacttccattttctcttttaaaaatatttttgtaaaggtaatgcctgtacacagaagagtttgaaaatacagaaggcaccctttttcatgaagttattttgtgaagtggtctattgcctgcaatggtaatagctaggaccccttacttactacccagcaggcactatgtagagctccaaatgagaaaatgttggctccttgcagatggttgggagaggagacaccagcactcttaacagacttgttaagagttgagactgataaccagagaatattctgggggaaaccaggagggatcgccaacatactcagttatatttgtggatggtgaattctacagtgaatttttctgttcaaaatcataatacagtcacttgctaactaccaacgccatacttgctctcagtgctgagaggtggcacaaatattattttcagtcttggtcatcaggcagggcctggcaggcatcatgctctgtgtgagtcagtggagtttattataagaatgcggtagcctccacagtgattatatttattataggaaaacgtgtaattttgttgtcagaacctttcagcaggtaccacaaaatctcatatgggaaaacgtgtaaatttttcatgaataaattcctttcggtattggtaatttccttctctgttttagtataaaagaaagcattgccttataggtggctaagaacatctgtagcatacataacacttaatctaaaggagtgttgaagaccgggctgattcctaattgagaatgagcaagaatagaactctttttgatagttatccctgttcttcctccaagcctctgccttggagctatggatactataactaactgaagcttcttctttcaggtacccactgatggtaatgctggcctgctggctgaaccccagattgccatgttctgtggcagactgaacatgcacatgaatgtccagaatgggaagtgggattcagatccatcagggaccaaaacctgcattgataccaaggaaggcatcctgcagtattgccaagaagtaagtcctgtccggtggctagcaattcacgttggatcacatgcatttgttttcaaaaaatttaacttcttgtattttgcatcagtattttaaccctacagtaaaaatcttggttcctaatgattcaccataccattaatatatttatttgcattaccctatgatatacatataaatgtttttaaaattatgatgtcgtattatgaccatcactaaacagtagtttaagatgtcacagcacttttttttttcctcactctgtcacccaggttggagtgcagtggcaagattatggcttactgtagccttgacctactgggctcaagcaatcctcccacctcagcctcccaagtagctggactataggcacatgccaccaggcctgactgattttttttaatttttagtagagatggggtctccttgtgttggccaggctgtctgaaactcctgggctcaagcgatcctctggctggacctcccaaagtgctgagattacgggtatgagccaccatgctcagccctccacactcctttcatcttcagtatatatctcaccacggctctacagtcaaggtcttttggttaaaagtgctagcattaatttttttctgttaccagcttgatacatattttagttcatttgtatctgtttgtattctattatagtttggttttttcctcccttattaattttactttttgactatcatgttagttctatgaaatatactcagaaagctcacttttcactcattctctattgataaacattttcattgttcctgatttatttttttggcaaaagaaaatacatatttttccttcttgtacaaaaaaagtacaaagttcactgttctgcactttgcttttttttttttttttttttttaacttaactttgtatcctggaaatcatcctttgtcatttcgtggagatcttcatttttgtttaattctttgtagtctttttgctgttactatacagggtgctcctttcttattcaatttaaaatagctggagttccaggcattttatctcacacttcttagatagttatctctgcatgtgactgcatcttaagaacattagaagtaattagtcttatgcttgttggcaaagcagaattctcgacactcattataaacagcagatagcctggcaacattttcttttgttgtaatcctttttgtactagaaatttttctttagcctacttggataatgaatgtttgttgtttaattaatattactattctattgagatccttttattttaaattgtaaatactaaaattattattattaaaaggtttaatttgttttgatagcgctctgtttaagaaaggacaagctctaattactaattggtgttttgagaagcaaaaagcatctacattatcacaatatattacatattaagtaatttttatcttgaaaggagtatgaaccatgatgtgaaatgatgaatagtggaaatcactaatacttaagttcattatatgtattttttgttttgttttgtttttttttgagatgacatcttgctctgtcgcccaggatggagtgcagtggtgcaatctcagcttactgcaacctccacctcccgggtataaatgattctcctgcctcagcctcctgagtagatgggactataggcacccgccaccacgcccagctaaatttttttgtatttttagtagagacagggtttcaccatattggccaggctggtcttgaactactgacattgtgatccacccatgtcagcctcccaaagtgctgggattatagccgtgagctaccacgtatggtccattatatgtatttttacaagaacattctgtgtgctgatttactaagtatggattgataataaatcagcttttgcctgggtgtgacttttataaagtgtcaatgttagaaataatatttacattctgctgaagagttcttgtagtacaattgtgtagataagttataaattttataaatcagaactctgtgcatacttatatgtttttgataccatttttttgatatatgcatacagactatgtattctgagtgtcaaataaactttttttaaaggctagaattaaaatttagtttatgacattgaccaaattgtccttttctggtgaatcgactattttgatacatgtgtcatagtttgcatctaagtttttcttcccttagtttcacgtatgaataaccagatgttttcacatttgtatggtggccataccaaaaattactcttcttgaccccaggaacacccctcttttcccgtttcacttagagatcctactaatgcctgggtagctttactttctgtcttagcctgttgtttgtcccagggtgtattagtctgttctcacattgctgtaataaactacctgagactgggtaatttataaagaaaagaggtttaagtggttcacggttccaaaggctgtatgggaagcatggctggggaggcctcaggaaacttagaatcatggcaggaggtgaaggggaagaagacacatgttcacatggccagagcaagaaagagaaagagtgtgaagggagaggtgctacacactttcaaacacccggatctcatgagaacactgtcacgggacagcactcgagggatggtgcttaaacattgaaaccacccccatgatccaatcccttcccaccagaccccacttccaacactgggaattacaattcgacatgagatttgggtagggacacagagccaaactgtatcaaagggttgagcacagagtggttcttcccagttctggactttaccagattgttggtggccaccatgagtggggagaattagccctttgctgtcaccttcctcttgcaattctggtattatctgtcctctgcctaccacccacccacggaagtcttgttggatgatacacaccagccagattcttcaacattaggcgccataagtaagaaagggccaaaacatcataccttgtgagccattttaatggatttgggctttattttgtagcaacaggaagtcactagactttattttttatctatttatttttttctttttttttcttttgtttttgagacagagtcttgctcttgtggcccaggctgcagtgcagtggcacaatctcagctcactgcaacctctgcctcctgggttcaaatgattctcctgcctcagcctcccgagtagctgggattataggcgcctgccaccacgccgggattttttttatttttagtagagacagggtttcaccatgttggccaggctggtctcgaactcctgaccttgcgatccaccctcttcggcctcccagagtgctgggattacaggcgtgagccacccgcacccggcctagactttattttttcagagaagaggagtgattgtagatttgcatttaaacaaatcaccttcttgctttatcactatgtcccctaccatatatcttcgttctcccagagactgccatgctgcagcctctagccgtgtgctgtccagtactgtagccactggccctatgtggttgtttggcacttgaaatgtggctagtggaaactgatgtgtgctataagtgtaagatagataccgtatctcaaagatataatgtgagaaaacctgtaaaatgatcacattcatttttatataggtttaacattgaaatagttatgttttgaatatgttgttaaatacatcataaatgttactgagttgtaactatgtgattaaaattgatttcacttgtttcttttgacgtttcacgtggcagtgaggaaattgaggttccataggcagttgcattctgtttccgtggaacagtgctgttctctgtgctatcccgagccaccagtgactctgagctgtaagggtcttagatcccatgatctggcaagtgggagagggaggtagaaatgagtccctccataccttcaaccagaacttcactgcatgttgcaagtcagggaacaaggcttgtttggggtccttttaaatacatctttcattaaatacatttggatgtaagatgattatatgcctttctagaaccctgtggtgctctcttcctcctcagacataatgtctttggatactaagggtgcattgatgaacagaacacagggcctgttcttcaaagggggagaaaagcttgtaaaatcataattttagcaatctaaaaactacatggtgacagtgacactaataccatcagcattgagcattcacaaagggtcacaaagggtcagctactatgctaagtacttgcactcattttacccactcagtgacacctgtggagaagaaccgaaggaaagcaccttggggaattgcagcattgaaggcaaacaaagagagacgattccccatgagggagatgagcagtggccagagagataggataggaagtaggaggcgttacatgctggaaggcaagccatgtaaatttctaaatgaggggaaagataagagtgcaagcatgatgcaaacggaaagcagttgaagtgtagtttttgacatggtaaaatcatgtctgtcatgcagactgaacacatgtcaaatattttattcaattcattaatgagatgaactgtaagatgtgaaaaatggttcattttgacttggagagatttaaaattccttccccagcacacttgagttgcatggctatgaacaggaatcatctggaattatctggaatatcgtcaaattatttccatggtacaggaacacttgcattgctatggggtgtctgcagtatccatctttacaaagctctaagggtgtggaatagcttgtaaggatgtaagtaataagggtgtaagaattttaagggtgtaagtcgtaaaatagcttatttagtagcaagtcaactggaggaacatgctgtagaatcagataatcctttccccgccaccctcagggtctgcaagacaacacctgcatttcaatgctaggacacccagcaatctcttttgctcatatcttgtttttggacatttgtatgtgtgtgtgacaaaacattgttaggatctggcaaatagaaggtcattgttgaccctgtggaatagcatggggagaagttacgttgtagtccattgcaggaaaaacaacgtgggtcaatggtgagtcagctgtggactcctggaggaaagacctagaggcaaaaagctttgaggtcattgaagacaaaaggaaaggctttgtgattttgatttttaaatggaaggaatttgggcctaaggaagcttaaactaaactgtgggaaggactgatacccatcctaagcactagttgcaggtatctcttaagaactaggttttggccgagctccgtggctcagacctgtagtcgcagcgctttgagtgagaggatcgcttgggcccaagagtacaaggttacagtaagctatgactatggtattcagttctgtaagaactaggcagaaaggagatccagtggatatgtgattgcctgggtcttggaaaggggagggaacatctccttttctgaggaagaatggggagatagggtgggttaattaggcagtttcttttgccaggtgataaaaaccccctaaacaatttgtattttatatatggagaatattttctcccactgatgggaaggatcgtagtgtgggggatgcttacccaatttcttaaaaatgtacacagaaatgagatccctaggtgctggaaccgagggtcagtactgcctagaatttccccattagggtctcttttgtttctgcttaccttcctgctgtgtgtttactccttttctcctgctaagatgggtgtcctcaaggagaccagggatgttggtagccacgacctctggtagtgttagtcctggtttggcatcccaactttgttctgcccatgggcattatcagggagtgcttctggttggcactgctttgagttacacgtctgcccttggagccaccaccgtatctgcagggactcagtatcaggactagcccatcttggccttgtgggtgtggccgtgtgatgtggggagaggagctgttgccagaagagggatgaggaatggcatgggcaaaatagaagaatgaccccagtgctgcaacacagtgggtatggattagaaaaggcttgtaggctggacagggcgaggtgagggagtgcatcatgcattaggattttaagtggctttttggggagtattgagcaggtggcaggggagacaagttcactcagaagttttagacagtgttgacattttctttcaaattgtgcatcttgaattctctagaacattctttatagatatttcaggatcttcctgccactttccacattgtagctattctggtgtttttcttttataattagaaataatgaatagttctcatttgtaggcttggattttcatgcgtgtgttggaaagtgttcgttttgccttttttttttaacttcatgtttttattttttaaaccgtattgatggattcattgctaggaacggcaaggaaaagaatactctcacaatgttaccacgtttccttctcacaggttttataagttgtattatttttatattttcaaagttataatcttaccatctcctctgttgccatacttctcattcatagggtctgtctttaactggactcattgtttacagctagtcttttcatcagatcatctcaaaccctgtattacattaatattttgattccgttttgttggatgactttcatcttaatcattcttattgttgaacaatgtttttcttattattgaacaattgcttcattaggtatagaattcctggttgatgggtgtttgattcagcaccatgaaaattcacggtattctggtatctgtcattgggcaaattcttcttctttttttttttttttttttttgaaaaaaatgcgtggaaaccattagttaccattgacagagctactcatttaatgattttttttttctcccaatagtggtggatgaattttttactttgcgttctcactttgtgtctctcatgaccaaaatattttagagataactagctggctaagtctgaggtggctgttaacagtctggtcctaggatagaacaaaaccaacagaactcatcaccgtcacgtcgttttgactttttgctcacaagtttaactcattgtttaatttgtttttccaaaggattgctttgcagtatacatgttggtgcatagcttaacatgatgataaatacataactttgactgtgaattatctactctgctcctttcatagtctcatgcttctctgaatttgtattttgtgttactgggttgttttgttgttatcattcatagtgttttttttgcccttgattctttgatccaggttttggtcaagggcaaggttcaagagaaaaagtaaaaacacagtcttttatttttgctcttggttataaacccttgtaaagtttgattgagaagataacttggatcttatggtttaaattgagtctttgtttaatcccaagtcttccaaattctttgtgcttatgtattctttcctctttcccaatcgtaatagttttgcttctgcctagtcattggtcaaatacctgcctttcaatgcatttaaaaaatattttgtgttagcaccatttgagatttttccccccttttttttcaagtatgtattgaggactgttatgggatgaatgtttgtgttcccccaaaatttagatattgaaaccctaaccccaggctattcggagatggtattcggagatgatacctttgggaggtgataactgttagatgaggtcatgagtatgtgcccccgtgatggaactagtgcccttataagaaaagataccaaagagcttgcctttttctccctgctcaaacgaagaagtcacataaggacacagcaaggaggtggctgtctgcaagcaaggaagagcggcctcaccagaactcggtcatgctggcaccttggttttggacttccagcttccagagctgtgacaaaagacatttttgttgtttaagccattcacagtaaggcagcattttgagctaagacaaagacctactgtggcttctgtaggcaaaagccctacagacccaaagtgttgtgagaattaacatttctagggatcatgccttacagtggattttatccaacacttagctctgacctagagcacgctagtcgtcgttaggtaaatgcttgtggatggtagtttctggcacagagattggagcggtaatgggcaggagttctgtatccagcttatgctgagagagcttcccataaaatggagcctatactttccttttgcagagaccatttctatccattgatagaattcttttttttctttttcttttttttgacgggatctcactccatcgcccaggctggagtgcagtggcatgatgtcaacccactgcaacctctgcctcctgggttcaagtgattctcatgcctcagcctcctgagtagctgggattacaaggtgcacgccaccacatgtggctaatttttgtattttggtagagatggggtttcaccatgttggctaggctggtcttgaactctagtgatttacctgcctcggcctcccaaagtgctgggattacaggcatgagccactgcacccagccttccatcgacagaattctaaagacatgtttaggcaagagttggtggaatgttggcgtgtagtccagatttgccttcagtttgtttttatccgcttcaaatgcaaaggccatgataattcaatagtaaagtcataaatccatagtatgacttaaaatatttggttgtaatattacaaagtatgcttccaaacacattaagcatgcaaaatccttatattgttctttttgtttagtgtttagggtagtttgtgtgaatcatagatgaccacagtagactgttgagttgttattttcttttgacattctttgatagaaaacagtgcttttcctctgttatttatactagaagcaaaaagtatctctcatagcattatggaaacaactcgaatacaactacgtcaattattcatcttttttttttttttttttttttttttgagacagagtcccactccatcaaccaggctggagtgcagtggtgcagtcttggctcactgcattctttgcatcctgggctcaagtgattctcgtgcctcagcctcccaagtagctgagattacaggtgcccacaccattctcagataatttttgtatttttactagagatggggtttcaccatgttggccaggctggtctcgaactcctgacctcaagtgatccacctgtcttggcctcccaaagtgctgggattacaggtgcgaaccactgtgcctggcagttattcatcatttaacagcataaagtggccacttgctttaataaactattatagtaccaaaattttggcctgaggaatttataaatataaatagaacaaaacaaaaataatattccccttgaaacatattctaaaaccaggggctaaaagttagaattgttagattttattgtcctgtttctttgggatgaaatgaaattttttaaaaaccatagttttggccgggcgcagtggctcacgcctgtaatcccagcactttgggaggccgaggcgggcagatcacgaggtcaggagatcgagaccatcccggctaacacggtgaaaccctgtctctactaaaaatacaaaaatatttgccgggcgtggtggtgggcacctgtagtcccagctacttgggaggctgaggcaggagaatggcgtgaacccgggaggtggagcttgcggtgagccgagatcgcgccgctgcactccagcctgggcgacaagagcgagactccggctccaaaaaaaaaaaaaaaaaaaaaaccacatagttttacttaaaccaaaggctttgggattccagaagaataaaggaagtgtacttcaattctacatctcaagaatctatttcttcccaaatttaatacaggcaaatttagtctatatttattgggcactgttaggtttttgtgtcaggtgttgctgagtggcgggataccattcttggcccataaggaccttataaatctattaatacaattaaattgtgaagaaaatttagaaaattgcaaaggtagaatgaggttgcaaattggagggtcttattctggagataggtggaagctatggcagatttttagcatgaatgctttctggtcaagacacttttagaaaaattagcttgtttccaagagtagattagattggggagagaaggaattcaaattacaaaataatagtgtgaaaagcattgtgggagatcatcctgtccatcccctcattcatgatatcctgaggtgctgtattaagggcatcattgctctttgtcacccgagcagtccaggaaggctgcctgttcagtcttagactgtatcctcacagtcttaaaccatatcctcactttatgatagaaacacacaggcaagtgttgtaagagttacatattgtcagttaaacaagaaattggatgagtccccatactattcttcctcttttaaagagagaacttgggccgggtgccatggctcacacctgtaatcccagcacattgggaggccgagtcgggctggtgacgagatcaagagatcaagaccatcctagccaacatggtgaaaccccgtctctactaaaaatacaaaaattagatgggcatggtggcgcacgcctgtagtcccagctactcgggagactgaggcaggagaattgcttgaactcggaggccgaggttgcagtgggccgagatcacgccactgcactccagcctggcgacagagtgagactccatcccaaaaaaaaaaaaaaaaaaaaaaaggaaaaaaaaagagataacttgaaacaggctcttccagcctctctattcttttaataacatgcagtgcacttcttggagctaggggctagggtctaggggcttcttgaaggtgttgatgtctctggtaacttacactgcagggcaggtctctggagggaactttgaacaggttaagcctcaaatgcaggcagagatttccaattgggaaagttaggtgaacgtggctttatcatctcttttattggtttatgggtattttctctttttcctgttttctttcccaccatttaacattatctgttctctgcctttttaaccttctggctttaaatgaacagttgcttaatctatagattaacaggatcagcaaacaaagcacagcagtgcctgcacaaagcagaaactgcctgttagatgagttgagcaaaaccatttcctttgcccaactttctcctctaaaatacataactgaacatgggattcccagacacgaattgtttctcaacctttctttttccattctacagttgtatgaaattaaaattaaataaaaagcaaacaacagaggtagtctttttaatcttaccgagttggaaggtatactatatacattatcctatggtagaaggtctggtacattcttgaccattattactttgctatgggcacccttcacccttgtaggctgaaaattggcaaatcataggcacgtatacattgtggttttggaatttgaaagatctcaaattcatattgagtgagacagtttttgaatggagggatcaggctgtctatatgtggatatattttatgcatttctggtctgtataaatgtaaggattgctttactgaccgtagatttcttctagggttaaaaagttgaagccagtttggatattttaaaataagaaaattagccctacattgaaagagagaataggaaaatctaggctatgtgtacacatctgcttgtgttttcacaattgtgtcctgtcctatttatttttatttctctcccatctcttccctcccacccacaatttgtttttcattcaacactttgaaattagaatagcttatctatcaaacaaggttctttgacaggattttccaactctgagtatgaaagtgtggatataacaatatatttatatagaatgtcagaagcagagtttggccagattattgggaaatattctaacgccctgcagcattttaccgcctttgcttttacataaggccatcatttggaaacatagcatgctgatacctcccattattgcagtagcgtttcatcagctgcacgctgcctctcagcgcctcattaagttgcaagcagagaacgttttcgttttccagttctctttctcaattaagttagagattgtattttcagtattcctcattattaaaagaatttttgttgagaatagtttaagatgtgatatttctttgtattccaggaaaatttaaagaatgtcattgaaatccagaaacagaagtatatattgtctaggacatgctttgtcttggtttatatgcctaagtccgagtagtttaaaatttatgattaatatactctttgaatgcttagaaatggcatcgattttagttgttctagtttcatcttaaataaattggagtaattactaactcaggattatgatgtgctacacataaaacatttgcagtgatgtctggtacttaggaaaccctcagttatgacatttttcttactttcttcttggatatgttctttgaaaaagggactggtatggaaaagctttgagacgatgaaaatatacaagataggctatctctgaaacaatttggtatagagcatttgattctctgtttcatgtatatattcatatatgctagctgcagtcatgcagacacaatttggatctgggtttttttttttttcctttttcacatgcagttataaatttagaaacctggctgtttcctctggactaaatgtatttatttaaattttcagtgctttaaatgcaaaattacaagcatatgtacaagtagaaagaatagtaaaatgaaccctcccatctatctgtcactgaattgcagtaatgatcaaatctagtcagtcttgttcctgagtcagtctggaatgcaggttttttcccttaactattcaggttctccagcaatcctggcaaaacacatgcgggtttcagctcatctctttcagtgacctgtaaattaagatgtgctaaagcatcacatgttactcattgacgttttgttaatatatttaaaacattttattagtaccacataatttttagcgttttcaaaaagaaataagaatttggctaaaggtgaattttaaaaattgaatgactaagtagaaaagtaggcaaactgttttcagaattagtagcaatttccaattccatttactctgttcattaactttgttttcagccttttgttagccatgtttgattttgtgtttttgaaatacctttggtcattttaggacttttggcattaatcacctgtcttaggtggcctgtttacaaaagggacttttcggttctccatttgcccttaatgttgggaatagagacaaagtttctgtaggactctgacaacatatggctttacaaagtttttttttaatatatacatttctcttcttggctttcttaaatatcatcaatgtcttttcttgctttacgtatttagcaacttaaatgtcatcttgtctgagatcaatatatttccaacttggagagatagtgagaagagagacttcagatttttaaaatgtggaacaaaacattctgatggtgaccaggttttaaggtatttcttcagtagacaaaactacttaggctaccgatgataagcttttaatattaataataattattatatataaaaatattaatataatatgatctaagattgtttctattccccctctttcctggttgttaggatttggaatttcttatgcactctttttttttttttttttttttttctgagacagagtctggctctgcctcgcaggctggagtgcagtggcgcgatctcggctcactgcaagctccgcctcccaggttcacgccattctcctgcctcagcctcccaagtagctgagactacaggcgcctgccaccatgcccggctaatttttgtattttttagtagagacggggtttcaccatgttagccaggatggtctcgatctactgaccttgtgatccacccgtcttggcctcccaaagtgctgggattacaggcctgagccaccgcgcccggcctatgcactcttaaaattatttcatgtactgatacattcactttcaatgataaaacatggctgtatgaccaggtaggtaggctgcttttcagactcctgtactaactgaatgggccccattagcccaagtgagagcttaacttgtcactcttcctaaatgccttcctcagctgagtgcttatttacagtaatctactgcttatagcagatgctatgatttgtataagctgtccatatctacttggaagaacaatattgaaaggcattgagatacttactttccctcaaaagcccataatccaacaactatttagaatatcttatttaagagataggtttataatacccaaagggaacttaatgtatactgaaagtccctgattgaatggattctgaccttaaccagaaatattaattacatgcttatcagacacttactgtgctatcccagggtttgccactgttgagggaacaccagatgaatcatattgtccctgccttcaaggattatatattctaataggacagacagcccatcagcagaataggaggtagcaagtggtcagggatcagataaagtgatcaaggcaagtggaggatgcagtggtaggacagaatggtctgcgcacagagattgagggcatcatgtggtgggaattagtgaactagcatgcaagccgggcctttttcttggcttttgttcaattggaaggagcataaagctactaaaggagcttatgtttagaaatagggcttattgaaggggacaaggcatctcctagaatccaaatgcacatcccaagacttaaaagagttagagggcacaggcaggccctgtcagatccggtctctgccagatccagtcttgtctgtttctcatcttcccttgtctctctgagtattccctgttttcctttcctggactaactgcttcttccagatgcctagtttgagtccacccatggttttttgggggcttttctttgtttttttgttacgttctgtttttgttttttgtttttttgaggcggggtctcactctgttgcccagactggagtgcagtgacgtgatcccagttcactgcagcctcgacctcctcgcttaagctgtcctcccacctcagcctcccgagtagctgggactataggcgcaagccaccatgcacccatgggtgttgacatgccacctgtggctcagacttatgctcacctccagtcaagtttcttccttatctaacgacagcctttgtgtgttcgtgaaagcccttgagggaaagaatgctacgtacagtttggttttcttgggctctaataagctataggggatggtgctgcagagtttgaaatacagtcactaatgagtcctccttcagagagctgagggtgggagcaccacataaaaggagttgggggtcagcagcctcctgatagtctgaaagccaaagatgatggatgtggggctccacggggaggctataacatgccacgttatgttttctgcccttgaggaaagcttcttttcaccaggcaggcagtacagatacaaacttaatagcgatgtgaggcacactgataaataccagaaaacattctgtaagaggggttagcattatttcactgtgtgcagaggaggtttgtccatgtggggggaccctaatgggcgtaggcatttgaagtgtagtctaagggatcttaggtaagagtgtgtttggaacacagtgtacgtatttatacagcaaatgctctgtgtggctataatttaggaaaatttgtaggacttgaggacagcttatttttctactagctgacagaggcttgggtttgcttctgctttaagtataagtatctcgagtccttttttaaaaaggaaaatcaaggaaatagttggaattgggtttcacataaaaaacattttagaaaagaaggggagtatgagagttaggatttgctaatgtttgctgtattagcaaattatttgcaatgcttgtcatattagcaatacatgtatgttttggaaaacacatgcaaattaagcagcttaaggaacttttatctttatttcctatgtaagatttgagatgctgcaaagaaaatattaaaacattgaaccgatacttacagtagtcctcctatatctgcagaggataacttccaagacccccagtgaatgcccgaaaccttagatagtaccaaacccaatatatactatgtttttttcctataggtacatacctgtgataaagttgaatttacaaattaggcacagtaagtaattcacaacaactaataatagaatagagcaattatgacactacgccaccatcactactcttgcactttggggccgttattaagtcaaataagagttacttgaacacaagcgctgtgatgaagtgatcaatggcaggtagcatgtacagcatggagacgctggacaaagggatgattcactttctggactgtgtgggtttgagatttcatcacactgctcagaatggtgcgcaatttaaaacttattgttggctgggcatggtggctcatgcctgtaatcctggtactttgggaggccaggacaggaggatctcttgaggccaggagtttgagaccagcctgggcaacataggatgaccctatctctttcttaaaattaaatataggccgggcacggtggctcacgcctgtaatcccaacactttgggaggccaaggcgggtggatcacaaggtcaggagattgagagcatcctggccaacatggtgaaaccctgtctttactgaaaatacaaaaattagccgggtgtggtagtgggtgcctgtagtcccagctactcaggaggctgaggcaggagaatcgcttgaacctgggagatggaggttacagtgagctgagattgcaccactgcactgcaacctgggcgacagagtgagagtccatctcaaaaaaaaaataaattaattaaataaatagaaaaataaaactcatttatttatagagctttctatttaatatttttggactgaaactatggaaagcaaaaccacagataagggaggactactatagttatgataaaaatcaggaacttaatctagccacgagaacatttgtatttctgatgaaatttttattcttgtctaaaatgttgaactatatttatatttatatctttaaatataaatgaactatatttatatctttataaatgagctatatatttatattttatataaatataaatatttttatatctatgtaaacataaaaaggctttttttcctctctggatgtttactggggttatttaataaaaacctagggatgatattgggaatttttgttggaattttaaattttaacgtgtttgtttctttttttgttttgtttcgttgtttgctttctgagctgggagttggctgtgcatgtggcagttgctttatcaaaagggtcttgctctgcttcagaagaagttttgttaccttgattgctaatgttctcccccttaaataaacctcctgatgttggaacagcaaaattgcattatgtttggaaaatctaaattaataatcccttatctctgaataaaagtaactgaatcaggttgaatttactgcttccattttaataggacagtaggaaaaaactatgcatgggctttatgtggttcaaatttttttttttttttttttgagaccgagtctcgctctgtcaccaggctggagtgcagtggtgtgatctcagctcactgcaacatccgcttcctgggttcctgcgattctcctgcctcagcctccggagtagctgggacttaacaggcgtgtgccatgacgcccagctaatttttgtatttttagtagagacagggtttcaccatgttggccaggatggtcttgatctcttgacctcgtgagccgcccgcctcggcctcccaaagtgctgggattacaggtgtgtgccactgtctccggcctggttcaaattttgtaatctccacatccatctgcatattaacaattgtcattgttggtgttatagagagagaagctgaagcacagaaaataacacgcatgttctagatttcctggtgggaactggaagtaaattctgtgtttggctgatcactgtataaagttctagtactagtctttagggaaaagccccgtcttcatggattttaatttgtcaatttgcaattctacctacttggaaatagtcaacctaatcagttactgccctgttgcaccaactattaccataggaatctgaagatggtatgcaaccaacatgaaaaagagatccttttctcctggtaatcagtttgtaccctacaaacaattcgttggttttaagttgtatagagggaaccatgatgtgaatatgcctgccactgggtttatagaaaaccgatgactcctgaggaaattctcagcagggttgtctttcagtgaaaagaaccctttagaaagatgcagtaactcacactttactgcacataaagtcatgtccctcagggtggactctcaggtgtcatacagtttatgactcatgagtgctgcagctttgtgatctaataaacaagtaaagacggtgggagaattatattcctgtacaaaaagccacttcacctttcattatataggaaaaaagccatgggaatattaaatttttagtggcatttttagagcattttctgtgatctaaagtgcctgcattgagatattaagatacttaagaacaaagtaaaataaagagaagtattaatagcaggatccctttggagctaggttactgtggcagtggtttcaagaataactctctcagcacccaccccaggattctgatttagagatttctttgtgtgttctcttagcatatacctctaccactgagtttatcccctgctgctacactgattgataccttatttttaaatttttgtttttaaaatagacggttttttagagcagttttagattcacagaaaagttgagaggaaggtacagaggtttcccatatacttgctacctgcacacatgcttagcctctcctattataaacatcccccacagaatggtacatttgttacaatcgatgaaccaacattgatacatcattagcacccaaagtccatagtttccctgagggttcactcttggcggtatacattttttgggtttggacaaatgtataatgacatatgtccatcattgtagtaccatacagagtagtttcactgccctaaaaatcttctgtgctctatctgttcatcctccccctgcccccaaccacccaaacccgtggcaaccactgatctttttagtctccatagttctgccttttccagaatgtcatatagtgggaagaatgtcatatagtatggagcctattcagatgggcttctttcacttagcaatattagttaagttcctccatgtcttttcatgggttcatagcccatttccttttagtgttgaatgacattccattttctaggtgtgtaccccacagtgttatttattcattcacagtaccttattttttaactgatttttttggggtctgggactaaggtgaggtaaacaaggcagtcaggaattgagattaagaatttttaatgtaatatttttaaaaatcaaaattactgcaaaaaaactccatgatgaacaaaatatcaactttttagacagagattgagtcacgctcaattgacatcaagccatgcatagttctcctactgccttattaaaatggaagcagtaaattcagcctgattcagttacttttattcaaagataagggattattaatttagatttgtcaagccctctgaatgtcatggacaattgtgagtgaaattccgtgtatcgtctaactccccatggatgttatcttgctcagaaaccttgttctccctccaaggaaggcactacttctcctgtagccttctcaggtcgaagttcttttctcaaaatcctcacagcgttgcccctagaggtgggaatgtcctcttttcctcttcatttcctcttttcctcttcatttttgtttccaaaccactcttcctttctcttccctaaaagcccccctacctcagcttgaagtgcatgctttcagacaaatcactttgctcctccacctgttggtcatctccagacctctttctacctcatcgatgttcaccattcagactttgaagattttagctcctgccttgctgtcatcaggtgtagctgctcatttgctgattcttaagtgatcctaatattgatctcaatgatccttccagtattccaatttgtcagttcatgattctcatccctccagtgaccttgttttcatcattctccatcacccattgcttacaatggtcatattatactccttgcaatgaccaatcactgcaactcctccaaaattttaatttcaattatttgactctccaagtactacttattaccacctcactttctccagtcctgtgcgccatacattctttagcccctggagtgtgatcagtggactcagattccactggtccctaccaccttttacctgtgtctaattcccctcatgttctcacttttgccacttgagattgcatggcccagcattctaatcattcccttgcttataccgtcacttctctattcgttgttatttatctggcaaaacaaccaccctgttgcaatgcaaggtttatgcaagggaatgcacattttcgaaatagatttttatgtttatgtttttctttcaaatctctactcattaataaatagaagtggtttgatatttcacaaatgtgatttaattgatcaagtttcacatttcattctaagtgctcagttaaacaccatgatgtattcacaacagtaatcaaagcaaggggctgtagttagttataggagcaaagagaattcatgagtttatttttatctaaatgacacccttgataacttttcgataagttattttcatgtaaattacttggaataagagcaggatttttatatagaaagctttctatgtgtcatatcctgtaaaatgtttgtccgattagtgagagatagggggaggttgaattttactaaacataatatccccagccatatctactgtaacgtttgtttaggacattacagactattatcctacaccaatttatttcacatcaaaaatcaccccatgcttgtaagaatcctcctttccccctcttgtttctattttagctcccctggaaaaataatattttaagtctaaatgagtacaataaattaaaaagttgcattgcttaatattttgaatggaatagctagatgcttgttcatttgctatctttttctttgtactgaatttctttagcttggtcagaggtagagcaggcttgactcttagtggatagtggtataggttgagtatcccaaatttaaaaatccagagtccgaaatgctcaaaaacccaaaactatttgcatgtcaacatgatgctcaaaggaaatgctcattggagtattttggattttggactttccggattccagatgctcaaccagtaagtatataatgcagatgttctaaaatcggaaaaagtcagagaccttgaaagcacttctggtcccaagcattttggataagggacactccacctgtaccttacagtggaggcttgttagatgcttgtaaatgccagcccctgcctcaagtaacaattgattctttttgtgtgctctcccaggtctaccctgaactgcagatcaccaatgtggtagaagccaaccaaccagtgaccatccagaactggtgcaagcggggccgcaagcagtgcaagacccatccccactttgtgattccctaccgctgcttaggtgagccggccggccgtggggctggtgttgattgggggcctggtcttgagggaagaaaaagaggatgctcctgttaggtcacatacacagacttgttcttcagcacattgccactctgtgttgtactgtgttttggactcttgcagttacattctgtgcactgaccctataggagcagtatttttgagttccctgcctcagaatgaatttacccagggtgtatattgaaattacaaattcctgggccagttccaggactcctgaatgaaaaatgcctatagtagcggatccgggaattcttattttaccgtatcgcatagatgattctcatgaacaggggccttgtgtgtttcttcacatagactttctagaagaaagaatctaatgtgaagctgcagcattttgttaatttctaaaaaaaaaaaaaaaaaaaaaaaaaaggctgttctacaataactactcctcttatttggtgatagtagaggaattggaattgggaaggctttttttctgcttacatcaaactggaggaaacagtctgattactaatgtttaatgtttgttttgtcacaaacctcaaatttacctcaacattttatttaaaaaaattgagtagttttatgtggtatcgtgctcttttcctctggaaactgtcatactccatatttaatctaacttggttattagtctgttcctagttgttgtttttatgtgaccagtcattgcagaagtcaagttctttgctctggtatcttacatctagatgttttccacaagtgtattcatcagtaggcaggttgtaaataaggatatagagattgtctgtggagattgtggacaaatattgatgtatattctgatgacttcttataaaggttaaaaggaatatttcaaagaaaatccaacagcaaacttacaaagtaaggatatttactgaagattccggagatctatgtaatatatggtcaaaaatgaatgtcctaagagcatactgattgctgttcattcatgtgcataatttgagacataaaatgaaaacactgggcattagaaagaagatttcacctggtgaatttacttacaatgtaattgatgaagagagtgtagaaaactagatttcttaaacatctgataattcaagagtttcctttttcctccttattccttgttcctatatgctttataaggcctcaactcttttctggttcatcaaaaagtgcagtttaattagatgaaaataagcagcacttaaattctagatacagaactcctactcaaaaaaatatagaagtcatctgtccccaggaactgtgtattttatactcacttagttattacaccaagaaataacacacagagattgaacaattcagtacaagttaggaagtagatcatgagtctgttaatttgatgggccaggctttgttaatgatttgtttcttttggttcttacttacctgttctatgaagtattccaaatatattttcattagaatgtaagctcactgagaacaggtagggctttggatgggcattattgctcctggtatgacactcaaaactgcagtcatgtttcagaagtgaacttatcattttacatagatttttctgcttcatattctattcagaatgatttgtattaaagttgatggaaagatgaaatccacattaagattgttatttactacctagtgccagttgttgtagcaaatatcctttgaaccccaggtctattttatcctatctgttgatcacttcctttgcccctgctcttcaagcctcctcatctctgaaaagctctccttccactgggtgtggtggctcaagcctataatcccagcactgtaagaggccgaggtgggaagattgcttgagcccagcagttagagaccagcctgggcaacataatgagaccccgtctcttaaaaaaacaaaaacaaacaaaaaaacctccaagtgaacgaacagtacaacaagtaataaaggatataaaagatgttctcagatctcaatatcaagtcagaagattttataataatattataattacacggagactgtccaaatatttgtatttgttgtgctacactgcattatgcaccatttagggaaacaacagcctaagtaatgtggttttaaataattaatctcatctaccaaatacctgtttgatagtaaagttaatgacctgtcctcaccttatgtttttaaccattatggaaagagaaccacttgaaaatatatcattccactgacagataattacccagctgtgaagcacaggctggagactggcaaggagaaatggagagaagcctataaaataattctttctcagggaaggagtttattcctgccaaggctttgccatcaaccattatcagatttctctttcatcctccgaacagattctgggctcctttgatgtggaggtacataattcaaaaagttgggtcacttgtgacatgttaagcaaatttctcagttctggttgtgtctgatgtgaaatgagcacgttgacactaactgttcttgactactatgggactagataatcatttgctatttcctgtaggtacttggcgtgttgaatcattttaccatattttctcattttatgaatcactggtccttttccattggacctgaaattagaccctaatatgacaagtagagcatatgttgtctcttactttgttattaaccttagattagaattaaggaatataggtgctgcttttttcttaggtagtggcaaattttccaaaggtctcaagcccagagtataatacagagttgataaaataacctggtagagtatgtagagcatgccttgtctttcaggaaaaggaactgaaaaacataggttttccaataggtgtaacataggtaacatagggacataggtgtaactgatgtacattttacttgcacttaatagacaggcagtgttagttcttcgtctctcttcacaggctatacaactaccaagatccagagaggttgaatttcttgctataactcacagcaaataaatgggagagtcagcactacagtccaagctctcttgattattggtccagtgttttttacagtatacacaaaaatttgttttaaaacaaatattcactatgaattagagacaatagcactaaaaaagaaactcacagctatcgttgtgttgacagaggagacaaccatgacctagtataggataaatctccatgtgatatgttttctactttatagtagtagtaggtaacattcttacatattattcctgcttaacaaagaattactgttcagcattaacataagtatgctctaaaatctcttgactgtatccaaatatatgttttagacaagagttttttttttttactgacctagcaaacaaaataaaattatcttaaacattaagcgtgttaaaattcaaaacaaagcttgaagagagaaaaatgcttgttatgtgtggcatacaaccttcctaacctctttatcagatgaaggatccagtgtggcactggattatttttctgtaatattttgcctcggacatatgtgctatacatttcttgtctgcatggggaaagtatgtcaggttgctgttgccactttcttcccatggagtggataatttcccttgagaataagttggctttctcatctcaccctttgcttttggtagtacctctggaaccagagggtaagattcatcttaatcatgtgaacattttattaattatctcatgtgtgattcaagcacatcattactgttactcaaggagaatattttctttgcaaagctttcaaccctttccatttgaatgactgctcttcatggtgtaatagatccactgttgaaattggcacttttctgtacttgtctctgaccagcaaaggcaaggaacattgcgtaaaataaattactgttgaattattggggcaaagtcaggttaatagcttaatccaaaaaaggaattacaagtgaaagaattttaccttaaatgtcattctgtttcattttgtaattaagaccttccaaatgtgtaagtagtaatgaccagaaatcttatcagatatggtcaaatgagaaaggtattcaattcatattaattttgaattttattgttttaatacaattttaggaaaagcatgccttgttttctgggtttcttggctgcctttgtatcaattatctacagctatcttctttagcatggaaaggatgtatttgaatactgtgacattttataccagggtaattctttgaatttatgtaaacaacaactctcttgagacacatcagtacaacacaatagtcagaaatgtcacatgagagttcaccaaactttaaagatggcgatgaggatggaaaaacatttttattgtagactttaaggatcttgtaaatccccgtatgtaatccagtgtgctagagaattggtgcccatggcgcctcctctccccaccgacctgcactgtggaaatcctactaattttgaagtcatgggagatgcatgtgtgggacctatacatgcactgtgatgagaatgatgacttcatcattctcattatttaatgagcccagctgctgcatacaagaaggatgcaaattcttgaatgttcttgattgtttacatcatggtctcataaggaatgaccagaattgctgggcatttcttcatcaggaaaggctaatcagccatccttggagagacatcagactcctttatatgtggccttcccatgggacctttgaatggtcaacgttaatcatgcttcagaaccagcatactaagtaaaagaaaacatgtccggaaaagaaatcttatcagtgtttatctcccaacagtgggattacaggtgattttgattttatttaagcaattttctatgactttgtataataaatgagtagcttttataatcagcaaaagatagactatgaaatcagtacatataattttgtatttgtatgtagtaccattgaaggataatagaaaaaagtcaaaagacttgaaagtcgacacagaatgatcattaatttgttttatctcttggtagttgtactttatgagctttatacatacagtatgggaaaatacactttagttttgaaaacaccatgatgccaaaataaaagaaaataacgttcattcatacgatcttcaacaaaatttaagcagcattaatcatcactgattcttcaggaagattcttgatcttccttaattttttttccctccaaaattgcatatggcagccacatttgtttcaggccagaaggaagaatgggaagagcttacatttatctcacagattccttctgggtgaggaagacttagaaagtgaagccctcttccatttgattaagcaagaacacctataaaaatggtgtcttcggccgggcgcggtgctcacgcctgtaatcccagaacttcgggaggccgagatgggcggatcgcaaggtcaggagattgagactgtcttggctaacaacggtgaaaccccgtctctactaaaaatacaaaaaaattagccaggcgtggtgcgggcgcctgtaatcccagctactcgggaggctgaggcaggagaatggcgtgaacccgggaggcggagcttgccgtgagccgagatcgcgccactgcgctccagcctgggggacagagcgagactcagtctcaaaaaaaaaaaaaaaaaaaaaaaaaaaaatggagcccttctaggtaggtcatcctccatggctcactgcagcacttccttggccctgtcccaagttccataattgcctcaattgcattggctcctgcttgatttgctttctaaaactcaggacagaggatgagttgaggagactgacttttttaacaatcgcattttgaaaagaaggaagcgtagtggtgtttcttggctccgtttccagttttgtttcttttcattttaattattgtacctggtattgtgtcctctttctgggacttttaacaactaatgttttgattgataagagctctaatagcatgggtgatttatacttcattacatcttcagttttgtcttctttactggagttgtattcaggtgtcattaagtaacgaggcattaaaaagaaacgataacttttgaaaaactgctgttatggcttatgagtgggctttgctgatattttcttgaagcacagaatttatctatctctgtaggtcctagatgataggtgagaaaaagaaacccagcttatttggcatgatattgtcccaaggcttgttagtaattgctttgaaaaatgaatagcaaggctaatggacatctgatttgtagtacatgctaagaattgcaaatgtgtgctcaaaagaaatttctctgattacaaaagtaacatatattcaacgtacaaagttgagaaaatacaaccactagctaaaaataatcaaaaccatttggcttccttgcagtctacatttttttcatgtatgttttgcttttgtttttagtgttatttaatcgtttcctgttttgtgacttgctttttacacctaacatttttagaatactctacctgtgaaattaaatattcttggagagcataatttttaatgtagcatcacaccagacactgtaatgtgtttactcttttttatggtcatttaggtggttttctttattttgtggtggtgtaatagttgttataaatgatgctgtgataaacatcctggtagataaatttgtgtttagttgatttttatataacagttattggcggaatgccttgcaaatcttatagttggtgtaataaaatatatgcgccacataattgtttatgaaaatatggaggaaaattttaatactgatttatgatcctgagtttaacataagcatggatacccctacatttagctatgatttttttattgatagagtaaaagcgcctgtaatttctacttaaggccatttaaaataattactatttaaatctatttaaacaattttaaatattgcttttccaaatttccaccttaggaagtagttaattgaatattctcagagaaataagtcctacaaaattgaccaataaaaggtcagttacgtattcattgtgtacgttttattgatcacccacagtgtgtgagcccctggaggtgggtgaaatgtgggcctccctcttacagagttgatagtgggcctgaaggggatgggatttcagctcaggaatttaaggaagacttgacaggaagtagcattgtgagccaagatttcaaggataagatttcaaggcaagaaaggagatgtattttaggtattcagacagagggtcaacaaagtctttaaggtaggaactagttcacttttcaaaaagaagaggtaattggtcatgataagagtagtagtttttaaaaatcattactgttttcattcatttataatgaatactattattttataattttaaagtttatatccaaataattgttttcaagatggtaatgaatgtatattgcttttatgtatacacatagtactttttgctttttggtaactaagtttataatttttgagggcaggaaatatttttgtttttcacttacaaagaaactatattttaataagagttttttgacagcagtgctttatgccaaaggaaaataaagcaacatttaacatatcaaagaaagccaatgcaaaacaaggattatttatttatttatttattttattcatttttgagatggagtttcactcttgttgccccggctggagtgcaatggcgtgatctcggctcactgcaacctccacttcctgggatcaagcgattctcctgcctcggcctcctgagtagctgggattactggcacccgccaccacgcccagctaattttttgtctttttagtagagatggggtttcatcatgttggccaggttggtctcaaactcctgacctcaggtgatccacccatcttggcctcccaaagtcctgggattacagacatgagccatcatgcccagccaaaacaaggattttatattcaatcaaactgacattcagatatgatcacatgaaataaatatcaacgtacaataactcagggcatattttcacattattttcctgtagaatctgctagagaacaagtttcagatacccaaaatacctagagaaaaactgatataaggatgggtaatgagcattaaggagaaacataaaaactaagactcaacgatggtaaaaagtatgataatatagtattccacagctacatgctgtgacaataaagagattctgtaactgtcaggcctctgagcccaagctaaaccatcccctgtgacctgcacgtattcgcccagatggcccgaagcaagtgaagaatcacaaaagaagtgaaaatggcctgttcctgccttaactgatgacattccaccacaaaagaagtgaaaatggccggtccttgccttaagtgatgacattatcttgtgaaattccttcttctggctcatcctggctcaaaaactcccccactgagcaccctgtgacccccacccctgccccccagagaacaaccccctttgactgcaattttcctttacctacccgaatcttacaaaatggccctaccccatctccctttcctgactctttttcggactcagcctgcctgcacccaggtgaaataaacagccttgttgtgacagtaactttaatggggaagaatgagaagaagatgtgggtaaagaaacaactgtttttctattaatggtggtagtattagtgtgtaattctgagcctggtgcataagtaatatggtgtaacataagtgaatagttgtgtgatattttaattcaatcatcccatgtatttgagaatcagaattttgatgtggtaaaagaagattcacatgtaacatataatctattaaaaagataccctgtagtcatgagtttgacttttaggtatcatttctcagtataacatattgttgtagatttcagataacattttttccccataaatactgtccgctgcaggcctaaaaataatgaaaaggcctaaaagaccaactcagtagcggtaaacaccagtactgcacctagattatggtctttaggaaccattttccagtaaaagataccagtaatctttggaaagcaggatttttttttctttttttttttttttgagatagagtctagcttcgtcgcccaggctggagtgcagtggtgcgatcttggctcactgcaacctctgcctcctgagttcaagccattctctgcctcagcctaccgagtagctgggattacaggtgcctgccaccactactggctaatttttttttgtatttttagtagagacggaatttgaccaccttggccagtctggtcttgaactcctgacctcgtgatccacccgcctcagcctcccaaagtactgagattacaggcatgagccaccacaacccggcggaaagcaggaaattttttaaaagctattttaattcagtcatgtaaaaaaaatgagcagaaagaaacaaaaaacttaaaaaaaaacttaaaaaatgagcagaatcttaggaatcacctgcgactttggttattcatgcttagccatttctataggaaattccagcactatttgagttagaccactaattatatgtgtgttgtagctttctccaagagataatggaattcacaaatcaaaactttgagattattaagtgttacaagtgaattataaccccagtcatttgctttcaaatgaacagctaaacatattttgtgttaatttcttatggatgctgctttgtttgtttgtttgtttattgagacggaatttcactcctgtcacctaggctgaagtgcaatggtgagatctcggctcactgcaacctctgcctcccgggttcaagtgattctcctgcctcagcctcccgagtagctgggattacaggcgtgcaccaccacacctagcagatttttgtatttttaatagagacagggtttcaccatgttggccaggctggtttcgaacttctgacctcaggtgatccacccaccttggtctcccaaaatgctgggattacaggcgtgagccaccattcccggcctagataggcttttagttggtttccatatacagtgtatatagggagaaacagactaagacagacactggcatccacagaagtaaaaataaaaagtaaggtataatttaaatttcacacggtcatggtcacatttttcagctttttgcacctatgttgtataaaaaagacaaaaatgcctttagaggctcaagttttcaggacttcctgaagctgtgtcatagtttaaaaatgccataaaaatgccgtcagatttaataacgtatcagctgaacactggatttctgttatgttgagtcttcaaaaatttctccctgtatgaggaattaatactgttatgtctgatctggtggtctgaaatgtgaacttttctgggccaaccagtaaacagctgctgttgctttatagctgcgtaattcagtcttggaaattattagataattcccacaccatttcagcttgctgttttaccataaatttaatgtgaacagtatttctagctaacctcaagctgtgtttattgtcgtggaattttctcttttattctgaggtaaatgattacaaatggttatgatgaggaatcaaagaagaaagtggactttcttcaaagttctttttctactctagccgcttctgagcatctttctcaagcactgtgtttccatcagtccctaccccaagcagagaaaggaaacagttttcccctttgtcttcagaaccctcttctcatcgtgtcattttccaaagcaaataaaaatcttgagatattgtcttgagtttgattttttttttttttttttgagatggagtttcactctttgttgcccaggctggagtgcaatggcacaatctcagctcaccccaacctccgcctcctgggttcaagtgattctcctgcctaagcctgccaagtagctgggattacaggcatgtgccaccatgcccagctatttttctgtttttagtagagacggggtttctccgtgttggtcaggctggtctcgagctcccgacctcaggtgatccgcgcctcggcctcccaaagtgctgggattacaggcgtgagccaccacaccctgccgagtttgatgttttttttaaccattcaagccagtaaataactttccagacagctgtagtagaaaacagaatttgtgtgtgacaaaacttaagattttgggattgagagctctatggtttatgccatgtggataattgtagccagatgaagaatatgaaatttaaggaagtgtttagagtggtacagacagctattattacgattcttggggtagaagagtagcttacatacaacataaaataatggcattaactgaattaacttcagcctttgccatgaaacccaagctttcattatgttttaaataatgaactacattaaaaatagtatataaatatgtaaaatatattagacatagacttctcataataaattatgggaacttttgatgtatttcttccctaggaaaagaactaaacaagtgcttctttgtggacttaaaatttttcagtttactattgtgaattaggtacagcatatctttataattccagataatacccataaaagcagaactgtttatttacttattatgaagggaatactgaaatgaaattaaggacaatttttttctcacgtattatatttttaaaaagttatttgatgtttgtgattaaataaagaatgaatttttaaagccagttctcaattagcactgaggaaaagaatatgctttttttcaggtacacaaataagcatcatggatataagaaacgacataaagatgaatctacagtctggattaagacgtattttaatttcagtgtcaaaggctgttaggaaatattcagattttagtacttgacaaagaaggttctcaatatttgtttcagtgttcagtgaaaggataaattctgtcgtctttctcttttatcatattagtcactgagtggtttcattaaacattccctcttccatatcccctgataaatttcaacttgttggtgatgcatcccaggagtgtctgtctttttttttttttttttttccttctcctgtcagtgagtcttaggctttggctttgaaaccctatagtgaagggaaatctcaggcaacagctgtgcaaccgtctggagagcagctagtccagattggaggagacgaacgaggctggtcgcaggagagaggcctccaggaaaaaatggcattgatgcattacctgcgttaaagattttcctgtacttagcatgcttcttagggttctactggagcgtttgggaaagatacagtattgatggatgcatagaaaatgaggcaaattttttaaatggggcaaatattaactgtagacaaagaaaagccaaaagtacaaaataacagcgttgtaagatacgaagataaaaatacgcctaagtatgagcgttctggcagactcacaatacagatgccatatatggggtaaaaccataccagtaggatggtgggaagggaaaggggtgggctcatgttccatagtgggaagacctacagcggaaaaatcaggagaatagttatttaagcacagagtttagggagtaagttgcagaagagacaactaaatgagatggccgtgaatgatttttatgacctcctcttgttatggagaaatcgatcaaggaggcctatatttgatggcaggaagaagttgagtttaaggtttccagacatttgttttaatctggaaaatttctttttttctttctttcttttttttttttttttgagacagagtctcactctgtcgcccaggctggagcgcagtggcgcagtcttggctcatcgcagcctccgcctcctgggttcacgccattctcctgtctcagcctcttgagtagctgggactacaggcgcccacaaccacgcccggctaattttttgtatttttagtggagactgggtttcatcgtgttagccaggatggtctccatctcctgatctcgtgatccgcccacctcggcctcccaaagtgccgggattacaggcgtgagccactgcgcccagcctaaaatttcttttaagcttagaagttgcaagtcaagttactgttaaaggcgtcctaactttgaattagataaagctaaactgtggtttaattgagctgagtttgttgtatgctatatctcaacttcacaagatgtttgctttttcttggctataacctaagattatacaaatataaaattacctttatgcccatttgatagactttagggctgaatttccctgtgtaagatgttgtagaggtttgtacttgtgattgtttttactctagaagcatgtttatcttcactcctttagtgacacgtgtttgttcaggaacttcaaactcaatgtgatcaaaactagactcatgttccctgaatagtctctcctgactacaaatctgttggaaacttccaatcctaattaataattgtaaactttttaatgtaagtcatatgaggggttgttgtgagcataggaggtagggagatggtagtgtgagctggagcatatggtaaaagttgtttgaaagaaagtagacccatgatgtggatcctgagggatacgtaaagaaaatgaagaggtgtagatttaaaaatgtttatggggcctgggcgtggtagctcacacctgtaatcccagcactttgggaggccgaggtgggcagatcacctgaggttaggagttggagaccagcctggccaacatagtgaaaccccgtctctactaaaagtacaaaaattagccaggcatggtgatgggcgcctgtaatcccagctactcaggaggctgaggcaggagaatcacttgaaaccgggaagcggagattgcagtgagccgagatcgcgccactgcacgccagcctggatgacaagagcgaaactccgtctcaaaaaaaattaaacaataaataaataaatatattcatggggatgttccagggaaagtagtttgtgttggtagccttgagaaataataatagaaaattagaatagaactaagttggttcattaaagttggaacacttgtagagatttttgatttggacagacattaattcatttgattatttctcttattcgatgtccagaaaaatatctgtacattcaatgtggttttatttgtactgcacatgtcattaataggctaaagttacctctaagatacctgctttcttagtccttgttacgctgtaaattctgggcatcaggatatagctttttattatgttagctcttttaatagatgatacaattggattggggaaaaaactgattatactctggagtaatactttcatagcctgtagtatcctgcaaatagctcctggtcatcttcgaattttactagcaaacttgtagggtaataggttgggacaaagtattataatcagtggctttgagggcctgataagaggaaacaataattgtgcagctatattgtgaataagtagtgcatgatgctgatggttaaccctttcctgcggtgctcaaacattgggaaataattgctttttgttcaaaatgtaagctcttcgataattgagacttttgtcaattcactgaaatattcccagagcttgaacatgtctggtacatagtacatatttaataaatatatagatttaatgaatgaattgaggatgtagccaaatattggaaaaggaaagggaaaagaaagaatagcccaaacattagaaagacagaagatgtggagcagcaatttcacatgcctaaaagaatttctgagattatggcaaaatcatttactttacttactccttattgatcaacaaaggaagagcaggttttatgtaacaaccaagaagtaacatagggatctcagaagagaagaaaccaagtgtctttggatcttaataaaaagaacattcaactccagaaatagggttaaacctatcctacacatgtctagtaaaaagtcagtgtatcagaggcatctgtgtttagagataaaacataccattagattcatttataatagtttcattgtccttagtttttaaggctaatgataaagatttttttttttttgtgagacacagtctctctgtcacccaggctggagtgcagtgacgcaatctctgctcactgcaacctccgcctcccgggttcaagcgattctcttgcctcagccacccaagtagctaggactacaggcacacgccatcatgcctggctaatttttgtatttttagtagagagggggtttcaccatgttgcccacgatggtctcgatctcctgacctcaacagatctgcccgcctcggcctagtgctggaattacaggcgtgagccaccacgcctggccttaagaattaattttcacagaaatctgcttctaaatattattcagtgataatagattttagaaatttcagattcttatgttgtaccttaaaggttaggatactatttataaatgctaaacatgaactcctgtcatcctattttaatgtctttattaagtgattacatgaatgtggcgtttcagtaggtgtttggtgtattaatagatgtaggtactcccctcttaaacctttaagtattttcatgccatgaaaaatttggggggcattctctttatttattgattaggtacctgtattttcaagaatattactcagcttcagttcccccaaatcttttttagtgttaactaccttccgagaacgtggtataacattttaaaatatattttttgaaggtttggatgtcactgaagatccccctatttattggatggtatctttatcagctgggaagataattagtttcccaatgttgctatatttttatgaataggtcctgtagctcttgctttcttgaaagcttagaattgattgtaagccatggactaatgatattctccaagcatatttaacatgaataggctcatgttcagtatgtcaagaagttaccctgttgtactatttaaataatttgagcttagttttctttttccacctttgttctaaattcttaggtgagtctgaattcctgggcatctgtgcacacagcttcttcagtaggtcctttactctcattgtatctgatctttgacttcataaagacccttggcctactgaccctgtatttaatttcacatctcaatagtatttagccttctcatatttttcctcttctttagagctccctgatccctcactccagtcattcaactctgtgtattcctttaacttccaccctcgctctgtctcttcacagatatgcttctttatatggtagtcagaagttcctgtgtgatcttcgtaacctccagttccctccacagtcacctgttatcaggcatctgttccttgagctccagggaatgagctctttgctatcattctggttgtcggactcactgggcactgttgtgtcctccacagtctctcagtggcatcggttgatgggtgcattctccccacactgatgtcattctgctgcttctgattttctttctgctgtcctccattttcctttcaggctcccttccccgtcctccccgcgccaccttttgcaatatttaggattcagaaattccaaatattgcaaaatatttagaatcagaattcagaaattctaaatatcagtgtttaataggagtaccctggggttgtccattttctcacacaacacatacttgctaggagatctcataagtgcagtggtttttcagaggcctgcattgatgattcctgagtcattatgtccaggccaggcctcatacatactatttactggttctctttctgcgggtgctccaccaagaattcagactcaatggaatatttcttctaagatgtacaccagttccttatcaaaaaatggcaaattcagacttcttaggttaaacagagaactcgtgaacatggcatatgtctgttattccatttttctctgttggcttattgctgagtaccatttgggataaaaatctgtttcaggcaaaggataggattgttttcagcttttattaaattctcctagacccttgattttatgcagagaactaattaaatttgaatgaatttaatgtagaaaccctgctattgatgcagaaatcaacctgattctggactagcaccagaatcaactatttttgttgtttttgctttctttttttttgcttttgctttctctgccggtaaataacaactagtatgtaagaatcaaatgaatcaagcataaatccctaggaaatatttatgcattcatttttaacaatttaaagatgtgaagatatataattaagcataatcctctcaaagtttgacgttgaaaagtatttcagatacttcaacttaaatatattttttgcaaaatatcttttttaaaaaaacagatgtggtctcagcaatgtaattattacagtgtgaggagagcttacagttgtaccaaaatttataactaggaagaagagaatgtgaaataatccggaaacctacaaaactgtcctatacaggaataccaattaaacagctactaaaaatgagtgtaaaatgacaatatggctttatcaagtgcttagggtctggaaaaatgcacatattgcctgttatttattgttatacttaatgaatgttcttttgcacgtgagaactgttataaaagatgtcttttgtacatacttggtacaccagttggctttttaacccattagctgttttcccccaaaggtggcctactctagatgacgttaaaaatacacattttccagggacttatataaatagtcaactgccctattatggaaacttaaaagcgaaggccctgaaatatccagacagtttgaacataaaccaaaaatgaagtgaatctctagaattgctgtgtaatagcgtgagtggggagggggtccctcaagagagggaactgacctttttcttcctcgtgggtgaccttgagtacacactttatttagtcattaaaagggtcacctgaagcttagagaatgaagatcctacagcctgttaattttatcattgttagaaactctctgcctttggcctgaaaatggtaaatcacctttcttagaagattctcatatccagatattcttaccaaatcagaatcttttccagcattttcttcaaaaaaccacagttctgggttaaaacacagcagatcctaactgtaattttcctttcatgtacattttagtcatctttataattttaaatgaaagacaggaactacattatttgaaataagggttaaccccctctaattataagcattaatcacacacagttttctcatttctaaatgttaaatataaaatgggagctatctcttcagacacttttctgttgccttctgtgtgcggcaggaccttacttttaagcttagtttgatttaaaggctgagtttctgcttgcttggaatgcttgctcttcaaaatatttgctccctggagagggaaactgaagatggagctttcacgtgactttggattgctgacctggaagacgtttggggtaataggatgggctagggcatggttccactgctttctgtttgagtggggtcaggaaaggaaggcggggctcgctgtgtgcaaacaggaaaacatagtctgaagatgtttgaagcctgagtgcactttcatttgatgccttgctttattgcttaagagaattttaaactgccgaatccgcaaatgtgctgcagcctataatgacacatatttaaatgatttttgcatctaaacaaatgcattcactctttgcctggtgtgtacaatttgaatgacactcgtgctctgcctggaaggaacagacgtttttcattataaaattcagtcaagcagaaaagtagcaaaggaagcagaaatttccatttacatctatgattgaagttgtagtgataaaagaggatgactaagttgaagagtagccttgttctcattctgctatctgacatgggatcttgtcactttggtaatagtttttaaacttacattattgaggaaggctctgatcagaagtctcaaattatacatgttcttcaaccttagatttttctgggtgttttgtttcaaaagtctcaaattatatatgttcttcaaccttagatttttctgggtgttttgtttggttttttggttatctatagatagatttgagtatctctttttttcttaaaatccgttacttactagtaataaagacttaagtggtagctttacgctccattatcacagagattcacagtactttttagtttttacttgtgagcctcagcaggtgtagacagataccttagttgccactgataacatccagttgccactagatcaagaaatggttcaaaattctccaggggcattttctgctaaagaagagttggtgatcttccttttggaagccttaatgtacttaaaccttcttccttagaagtccagaaattcaattatttcagctctctgtggagtgataagtcctgccaaattgatttacaataatgaaactaagccttgtttacaaatctaagtggtgatttctaagtccacagaggcgtggtaacagagagagagattctgatttatctgggggtctatccgtgtttgaacagattgtgtgatttttgaaacatgattcaaaagggatgttgataaattctaaaatacatttttattgaagagcttgatgaatcatgtatacttactttatttgttattctattagatattgtcttcctcatccctaggtggtgttgctagtacagtgacagaattcaaatccttctttttcctctgctctaacagagctttgtgaactcatagcaatattgtaatgcctggtaaaaggtggtgccagtttcaagtactatatcctaattacttcatggctaactcttgttattgttaacaatattgttaactcttttgttaaatgcagtgacatcttttttctttctcattctctgtgtactttttgccctaaatagttctgcatcttttaagatacaagtttgctttttcttggaggtttttatttggaaaatgcctgaaatatatagaccaacatttgttcctccaatggttaaattacattgtctcccaaagtgaggcattttaagtctggactatacccaggagaatctaaaagaggcagttaataagctcttgaagagcacagtggggtggttgtgtatttattgagtctcacacttaggagagaaataggctggaccaaatgagcctgggcatcaaaagcatgtgggtggtcgttggtgatatgtgcagtgatgagtgtgtgtgctgagggtcctagaccaggctggcagggaaatgaactgaaggcagtgaagcctcccctgataactgcagagagtgctgcagcatccaggacctcaggatcatgatgaacaagctgtagtggatggaagggagaggaactatgggaaggatgagtttctggccagaaagtggtttactggagtgctgtgtctgagtattacatgatctgaggaccatgaggtccagctttgggagtatggagagtttgagtggagtagagttatagtcccatggtcttctgattcacagacattcatgagcgataagtatctattgagaaagtggaagcatgatttttatgacctcctcttgttgtggggaaatcgatcaacggggcctatattggttgggttctacaaccaaatagaatgtgttcagcaggagtcatgttttgggctcctcacaatgttcagtgttagttctgttcctttctcttgcttccacataggaaagactttgacccaatgaggaattagtcattgtcctttgggtacacttccggaatttgataatcagttgggcacttgattctagtacatttgctaaaagtaattaataccctgcaattggaagcatgcagcaagcgactgggaatgctaagtgaaaggtcagaattgaaagagtggaggaggctgttgacccttaggcatggatgatatgtctgagtgagaaagcaagaagagtagaagacagagccttactttataatcagaattatgaaaagaggagccaatgagagggaaagaatgattggcttgagatagattggtggaaactggagaagattgaatttaaagaagaaaagtgggccaagttcagtggcccatgcctagaatcccagcaaattgggaggctgaagctaggagagttgcttgaggccaggagtttgagatcagcttgggcaacgtggcgagacccctgtctctacaaaaaataattaaaaaaaaaattagccaggcatgttggcatgtgccggtagtcccggctacttggaaggctgagacaggaaggttgtctgagcccaggaggctgcagtgagctatgatcacagcactgcactccagcctggttgacagagggtatccccgtctctttaaaaaaaaaaaaaaaaagagaatgtggcagagtagtcagagaactggagggctgagaagagactgatggcatttgttgttcttgaccttgaaagaagagttgcagattgttggagcaaggccagatggtaataggttggaaagaacaagtgaggggcgtgagagtgacagtctacaaccccgttaagaagttatctgtgaaaatgcctcttcctgtcttgattatagcctccctcgcacatggctttctgagtatggtatgtgaaaacagcatgctgtatatttttaccttcccatatgagttaaggttttggtaatgacttgtggttcttttgcctcacggaacaccaacctggttggtattttgtcggcaattatgtggtttttaaaaagccccgtatataaccttaattaattgcgtctctaaaatctatcaggctttgagttttttgttttttttttttaaataaggcagaaagaaaggaaagtgttaggagaaagcaaccagtgagaatacctatattttgaagaaacaaagtagggaatttagaattatctctactatatctgctttttcagctcatctctcgggatacagaggactgaactaagctaaagtaggttcaagtctaaaggaaaccttaaattaatttctgtattagaattaatcacacacctataaatacaatttatgatatgagaactgcaacaagagaaatggggggagatgagcagtttgctgatcaatagggttaatgatggtaacatagaatcctagtgatatgcctcccattgactaaaatgtatgcgttaagatagcatagcgcataaaatggtgtactgcagtctcagtgtattcaagcttattatggtttctctgcctaggtttgtgtctttggctttagattttctcccataaccccaacctgtccacattcaagtcactactccttgaaatatattattgatctctaaaatctgatgctaagtctgtcttgcccaacggtggccactagccacccatggccattgaatatttgaaacctggctagtccaaactatgctgtgagtataaaaaacccaccagatattaaaaagttagtctgggagaaaaaaacaaatgtagaatgtcttaatgataattatttacattgattgcatgttgaaatgatgaaatttaggatgtactgggttaaaatatattaataaaattaattttacctgtttctttttacctttttatgttaatgtggctacaggaaattttaaattagatatgtggcctctattatatttctgtgagacaaagctgctccaagctgttttggtccagaactatatctcggttcttttgtatcctacatggacctgcatagaatggtatttagtaatactcagcagtagcagagatgatctcttatcaaattatgttaagttttaatttttattcttgtctctcaccctatgtgcacctctctggccaggaggcatttatcatatcaccttttaatatttggaaatcacttgatctgcttgagtcattgtgttgttttcaaatctagaactctttctaccttattttgtaacttctataattaaacaaaaggcgaaccaggagcagcttggctcttagggatgtgtgaaaaggcgctcagtccttaagttggtgccaaaagtgacaaatctataggatgagatgcaggtttatggaagagaagcatgaaaatttttattttttaaaaggacacagcaagctagtcaccaaaagacagatacttgattctacttatatgcggtacctttttgaatttgaagagtcaaattcaaaaagatggaaaacagaatggtggtttccaggttctggaggtgggggaatggggagtggaggtgggggaatggggagtggaggtgggggaatggggagttgtttaatggtgtgcagggttttagtttagcaagatgaaaacagttctggagatggaaggtagtgatggttgtacaacgatatgaatctacttaacactaaactgtataattaaaagtgggtaagcaaagagtgtcttacaaagcaataacttgtaacttaaaatttttaaaaaccttaatgagattagttgtaatgggttatcttaagtagacccttactgccggaaggaacagctgaatcacatcacttgggagcttgttagaaaagcagactcagtcccaccctagacttgtccaatcaaaacctgcattttaacaaggcccccaggtgattcataggcactgtaaagcttgagaagccctgctccaaatatcatttctcaaagtgtgatccatgagccacctgaagcagagccaccctgggaaggtctgttttcaggcgcgtcccagaacacgtaaatcagatctaggctgtggagctagggagaagatgaatctgcagactgatcaggatcccaggtgattttgaagcatggtttgagtttgaaaacccctaatctggaaagctttaacaactattactcttacaattccatcttttaacgaatgttggaattattaaatacttgtaacaagaagtcctgttattgataaaatcaagatatgactaatagtgcagtcaaaaagaggcaacaaaaaagcacctataacttatcttgggttggttaatgaggaagctgtcattcaaaattagtaagactactgtaacatttcttggggtcctgaacattggaatgagagtcggttttcagagttgagcccacctctgtcattagctttgtgcaaacctcatcaggctcaagattcctcatttgtaaaggggaatgaattctctgaccagttagtttacattcctaagacaaggttaaatttggaaagcaaagaattttcggtatatatgtgataattttgaaattcttgaatttttaaaaaatttaaatgccacattacttatatttttttctaaaaaaaagtcaaaccaagcgctgtctagttattaatagataccacagatgagatgcctgagttggtaagctctttttaattctagttcttttcaactacaataattttatagacttttttttgaaggctagaatgttgatgtggaatcaaataggtatgcctctatgtatggtagatgcacctgacagggatcacttgacttgaacatgccctgacaatgatcctgtgtggcaggtgcacctgattctgagttctgagttaagaaatccgggagtgggccgggcggggtggccggtgcctgtaatcccagcactttgggaggccgaggcaggtggatcatttgaggtcggaagtccaagaccagcctggccaatgtggcaaaaccccgtctctactaaaaatacaaaaaccagctgggcgtggtggcgcaggcctgtagtcccagctactttggaggctgaggcaggagaattgcttgaacccgggaggtggaggttgcagtgagccaagatcacgccagtgcactccagcctgggcgacagaatgagactctgtttcaaacaacagcaacaacaaaacccaaaacaaaaaaacaacaacaaagaaatccaggagtggctaacccagagagccattccttatctgtaaggaacatctgagccctcatctccttctgtggaacatgggcctcgccggggattgagaccctttgttatgagttaagtggaagttgccaggtggagattgttagggggagggtgttaaatgagaatgctgtagagaccacatgccttttgcaagcggctgcggttcctctgtccaacccaccaccactggactctctaccctgtatgcaagcccccagtaaaaccctatgagacatacggttcactagctctgggcctcttctggctcttgaacctggtgccatccacattgcagtcagtaggagtttggcatgacaccttattatgtgaacttttatatcaagccattaaatttttttaaaatagactttatattttacaacagttttaaatttacaggaaaattgagaggatagtccagagagttcccataggctttgcatccagttttccctattgttaacatcttatattaatatggtacatttgttgcagtcagtaaaccaattttgatacatggttattaactaaagtctatactttattcagatgtccttagtttttgtctaatgtcctttctgtgttccaggatgccatccaggaaggcgcattatatttaattgtcaggtctccatagcctcctttcctcttggctatgacagtttctttatacttctctagttttttaataaccttaaaggttttgtattggtcagataatttgtaggattcccctctgtgggaattttctcatgctttgcctggggttattggttttaagaaggaagaccacagaggtaaaatgcccatttcatcacatcatatcaagggtacgtgtttatcaacatgatacagccctgttggcattgaccttgatcacctggctcaggtggtggttgttgagtttctccacttgaaaattactcttcttcccactttatgtgctctactctttggaaggaagtcagtttgcacagcccacaattaaggagcagagaattatgcttcattttcttgagggcagagtatctacataaattatttggaattcttctgcgcaggagatttgtctcttttttcctatttatgtattcattcattcagtcatttagactcatggatatttacattgtactttgatttctaatccagcactacttcataatttttattgctcaaattattccggctttagctattagaagccctttcacttggttcctatgctcatttgacatagcctcttttttttttttcttacaagatgctgcagtctcatcttgcatattttcagccctaatcctagaatcagctgttcctccaaggagcccttgttccttttattggagagtaatgttattggagaatagtattaaaatctggatgttaaggatgctcgttgccactggagtttctttgcttttaagacttctcagttgatagagcaaggcaatgtatttgtccatgttcacccttatgttatgcagatctataaatatttctatagctaactagttgtatttatattaagctataatatctagtctatattaagctaaatacaagttcatccggatgtttcctactctaacgtattaccacatggacactatatctctcctccttggttatgtataaattctcactccatccaccatctatgtacttaattgttcagtttcagtatatgtgcgtagccgtatcagaattgttaacccaggctgggtacagtggctcatgcctgtaatcccaatactttgggaggctgaggcaggtggattgcttgagcccaggaatttgagaccagcctgggcaacatggcataaccccatgtctactaaaaatacaaaaaaattgctggtcatggtagcatgtgcctgtagtcccagctacccgagaagctgaggtgggaggatcacctgagcccaggaagtcaaggctgcagtgagctgtgatcgtgccattgcactccagcctgggagacagagtaagactctttcttaaaaaaataaaaaataaaaaatataaaaaaatttgttaacccacacctatatggatctttttaaaagctgcaagactgctaacaaatatttatttatttatttatttatttatttatttgagacagagtctccctctgtcacccaggctggagtgcaatgacacaatctcagcccactgcaacctctgcttccccggctcaggcgattctcctgccccagcctcccgagtagctaagattacaggcacccgccaccatgcccagctaattttgtatttttagtagagacggggtttcaccatgttagccaggctggtctcgaactcctgacctcaggtgatccacttgcctcggcctcccaaattgctgggattataggtgtgagccaccatgcctggccataaatacttattttgttcccgtggttttttttttcttttctcttttttaaagtaaatcctttgcactatttttattattttaagaccagtgttattcagagcctgggttaaacactattctgtgtgtgtgtgtgtgtgtgtgtgtgtgtttgtttgtttgtttgttttttgagacagagtctcgctctgtcacccatgctggagtgcagtggtgtgatcttggctcactgcaacctccgcctccctggttcgggagattcttcggcctcagcctcccgagtagctgggactataggtgcgcgccaacatgctcagctaatttttgtatttttagtagagacggagtgtcaccatattggccaggctggtttcaaactcctgaccttgtgatccacctcggcctcccaaagtgctgggattacaggcatgagccaccactcccggccagcactattctgtcttatactcactctgccatctgtgtgtgtatatggtacgtatgtgaggctggatctgtgcacttggaaaagttggagagatgatttaggtaaaacttttagttttcacttcttttgcctttttgcttatcttgatccatttagttcctaccatctggcaaatagttctcatctgaagaatcccatctgtcagttctcactattatccggtaatagttacagtgaaatgctggtgacggcaacagccactttttaaaaggatgtgtaattcaccctcatgtcctctttgagaacccagtaactgcccacactctgaagctaaaaccataacagttttatcacatggaaagtttgttgagaaatgtttggctgtttctgtgaagtaatcgtcccgtctcttgagtacagatgcctcccaggaaaattttcccagcctatttgttaatgtgaaagttacaaaagatagcatataatgagcacattcaagacaaaaaaatttgtggagtaagagtctgaaatggtaaaataaaaaatcacttaagaaaacatttatctgtagctgtcattttcatatacacatatctagtgtatacaagttagtaagtacataattctcaaaagttctacctgtctacacatctacacagaaaaattaggaaagtcttgtccagacttttccatcatcttcagtataaagcatcttctagctgttggaatagaaacaagctagattcttgactcctttctatttgattatttagatctgaccttcagacgacatccagaatctgagaacacgcaccacctctactgctctcatcctggtccaagtcattgtcatctcccacctggattaatgccagagcccccttcctggtcttctcacttctagtcttgaccccctagggcaagaataattagcttagaaaaccaccccagagccttccagcattactctgagtactggccagagttggacaatgtttaaggccccgtgcagtcagctgtccctgtcctgtcctggctgtcactcactcgcttgcccactgatctcttccacatcattcctccacgacagcactgatctccttgttcttctgtgagttcaccaggcatgcatctgcctcaagactttgtgtaatacttgttgcttcctctggctagaatattcttccctttgattctgaatactttgttccctcacttcctcaagtcttcactgaaatgtcatattttcaagtaggcattccctgaccaccctatttaaaatttcacccctcagaaaaaacaaacaaaccacccctttctctgctttatctatgtaacatttattaccatccaacagacactgtatttttatctgtattttttatcgcttccccgctaggatcatatatcgttttatctgttttgttcactgctgtattcttagcactgagacataattgtaagtatgcagtgaagagttagtggataaaggacagtggctgcaagaggggatttaggaaacaccccctcccagccaggaccagcactcggtgcaagagttgaaagagttgatcactcagattctctgcttctccagtcgtagggactccaccccgctgtgttgattgctgtcatgtattcaccccatcataagcagtactcacatgtaaaacagtaccatgtcatctctgtggggctacaagtaggtggtgatggtgcaatgaacatataaaaccccagtgtcttcagtaggtgcgaaataggtgattagtgaatgatgaagagtagctgttgctgttttgattactatgattattattatgagaaactactgtggttgatgagatagatactggggagaaggatactattaatataatttattgagcaactttgttctgggcactagttgagtactttagggatattaattcatttaattctcccagttctgccatttactctctatgtgacctggactgttacatagtctctcagtctcaccctctctttttttttttttttttttttttttttttttttgagacggagtctcgctctttcgctcagtctggactgcagtggtgctatcttggctcactgcaacctccacctcccaggttcaagcgattctcctgcctcagcctactgagtagctgggattacaggcatgcaccaccacgcctggctaatttttttgtatttttagtagagacggggtttcaccatattagccagactggtctcgaactcctgaccttgtgatccacccgtctcggcctcccaaagtgctgggattacagacttgagccactgtgcccggcccttgccttctcttataaagtgaaatcattgtagctgctttggtgtggttctgaggacggtgagagaagacgcacgtgaagtattgagggtggtggcaggcacacagttcagagttactaacaatactggtgttttatcttcacaaggcagatctgggcccatagcacaaggaaaccgaggctttggcattttacagtaattacattgccagaacatttcccccactttcttgaatcatctttacctcttgagagatgaggaagagagggcacacctcgggcagaagtccaaagacctcaggcatttttggcctttcattcccatgattctggccaacatcattttagtccccagcagttcatagaaatattgtcttttaatctgatattcaaataatctgtgccttgaagaacctgtgtatggctctagaatcttttacattaatctactcaaccccactctgatgctcaaaacttcagcagtctgttttttttttattttaatgtctttattattatttttttttttgagacggagtctcgctctgtcgcccaggctggagtgcagtggcgcgatctcggctcactgcaagctccgcctcccgggttcacgccattctcctgcctcagcctcccgagtagctgggactacaggcgcccgctaccacgcccggctaattttttgtatttttagtagagacggggtttcaccgtgttagccaggatggtctcgatctcctgaccttgtgatccgcccgcctcggcctcccaaagtgctgggattacaggcgtgagccaccgcgcccggcctaatgtctttattttaaacatttatttttagaggtagggtctctctaagttatgcaggctggcctcaaattcctgggctcaagtgatcctcccaccacagcctcccaagtagctgggatgacacccccaggtgccgccatcctggcagcagagtcagttttgatacatctttcccttctcattcttcccaatgtcatggattgggaagttactgtggttttagttgcagtactttttactctgaattctgtttgcttcctggaattctgtctgtcttttgaaaagacaacataaagaaatcgaaaaatatactttaaattccatagtgtgggagcctctgctactcgcctgtttgatattcattcccattttttcctttctaaaagaattccagattttttttgttcagggtgacaatgtgctctgctgaaaatactttcacagattcccttgcaggtgcatgtgaccagatcacagtaatggcacatatggcctcagtggaatttgctgaggagtatgtccctcccaagtaacagcaaagctttattagaggaaaaaacaacaacagaaaacctttcacctttgtcttgtttctcctgccttctgtctggaacttggacacagagtcttgaatttctgtgaccataaaacacgaggataaaaccaacgtgctcaggatggcagtacagaaagataggaatacgctggtccctgatggcatcatggaatatctgcagtggccctagcttcagtgtcacttcttaggtgagatacataatcctaccgtgtgtttaagccacggtttgacatgtggtctattctctgccgctgactgcattcccagctgttctatatggcttgctagctaatttaagtctagttttattgtcaaattgaccacattgtagattataatattaaagtacttcacagtctaaaagtgaactacttttgtaaaagccaaaggaaatgggccaaatgaaccattttgaacagagtttaaatgagtgagttgagttaccactcttggatggagaactggagacctggattttcagtctagttcttctgccagttggctctgtgggcaagtcacttgacctgagctcttttcctcccatctgcaaaatgaggtaatttgagctagacagtcctcccaaagaccaccaaagagctagcagattgaggcctgcagactcctattgaatttgccatccttgttcaccttgccaagacttcatagccaagaagccagacccagattttgttcattagctttgaaaacaccctttcagttgggtgtgtgtgtgtgtgtgtgtgtgtgtggtgtgtgacatgcgttttgaatataaattgtgaattgttttagcaagaaaccaggttgtatgtttctcaataaacatgcatactgtatattgatgaatttatccacttgaaataaatggtgccaaattgcctaaagtttgctgtaaacaggaacatgatttctcattatgatgtttaatttgttttagtctttgatctcttacatcagaattctgttaagaactctttttacctgaaagatcaaagcaaataagcagaagcatttataaaaataaggtatacgtggctgtggagagaaactccaggtatatacgatcataggctttttaaaattaataaactttgtttttaaaaacaaagcagtggaagttcacagcaagtttgagtagaaagtacagtttccatgtaactgctgtcctagcaaagatttttaagtacaatattttttaattaaaaagagaaaatataaaccgtgctaagccagttggtgaaaaaggcttcattatacttttagcactcttaacgcttattaaaagtttttaaaaacagatttttgtggttgaatcgcttacaatttctgatgtgtaaccttctaacatgtttcatcaaattttaaaagtaatgtaagcagtgctgtccactgctaaattttattttaatgttagaatacaatgaggtttctattttgccattagtcctgagagcttattaagtaaccagttttaatcctttaaaaaaccattctcattttgagggacacatatttcttagctttgtgcaatataagaagctaagaccatcttggcagtatcaaatgaaatgttttgcaagttagaaagttcagtaaccacttataaacataatgaacaattgttatagtcagtctaatgcagaaatacaggtgttgggggcaggggggtggtgggtgggcagacttggtccacaagtagtagtttgccaacctctgtcctaaacacaagttcaagaatatggttctcttggatagattttctgccagatgaaagtaagagtaacatccttagctaatgaactcctaatatccaaggcaacttttaattaattcaggcttttaagaaaagcttgtttaccaactcctcattaaaaatgttcagactggctggtcgtggtggctcatgtctgtaatcccggcactttgggaggctgaggcaggcagattgcttgagcctaggagttcgagaccagcctgggcaacatatctagaccctgtctctgcaaaaagtgaaataattagctgggcatgatggtgcacagctgtagtcccagctactcaggaggctgaggtgggaggattgcatgacccccggaggtcgaagctgcagtgagccattgatccaaccactacattccagccagggtgacagagtgagaccttgtctgaaaacaaacaaacaaaaagattaatgcagtacatgtccttttggtgaataagtaaatatgttttggtaactttagctttgcattataatctagtcgtcagcagattgactaagggcagataaaacaagatgatttggttttgtggtttggcacttactgtctgatttatgcccccaagaactcttgcaggccaaggtcgagtgtatctgatacctgctctggctcttctcacgaactgatttagtagctttgggccagcattagattttttaaactctttgacctatttgtacatgacaggcatttaatctttccagtagttacttgtcaaatagaaaagcatcacttcttagtttggacatttgcaaatatgactgagcagagctgacagatgaggtgggcatcttcaggccatagggtacttctggcctcctgtaacctagaaaattgggatgcctcagatatcaggtattcttccaagcagctagggttagtccctgacctcagaaaccctgagagccctcagaaaccctgagaaatccacctgggaatggtgtatttgttttggatgagattacctttactttccattctccaggtcttcttgtgttttttgtttttgttttgttttgttttgttttatatcattctatgtaaaagagaaatgtggtatcatttgcattatcatgttatttctttccttataatttatatcttaatgcttatctctggggctaggttataatctcctgagttaggtagccttaggtttcttggcggagattcctcccctgggaagtgaggtttataaaagaacccgtgatgtggccctgtggagctgcatggggtgtgtgctcagtactcactggtttcttccctgcaaagtgacacctgcagcctttggggtaccatgtctcataatttttgcattccctgcaacacacactatactgctatgggcatcattgatcattttaaagatttaaggaatgacaagatacagtgcttattctcccctatgatttgcttagatttttatctaaatagtacttattgaaataagtacttcagtatcatgctacatcttacatgtttgagctagaaacagactaaagtttaaacccttttatgagaatgaaaagttacttccttccccttcttagggcttttaatccctctttatgttgcatttcagaaaatgccctatagcgtactatgaaagaaagacattcattcctgtctttgctgctgtgtggacgatctgtattccttgctccgtgggagttgtgggtttatgtctattcttgcatgttttgcctgaaggaccacagtgacctacttggtggtctccctgctttcatggtttcactatgctgatctatccttcacttaattatagagtctatcttaaaaaaaaaaaaaaaaaaaaaaaaacttttggcctatgttgcttcttccaaaatggcatccaaaacctaagcctctttaaaattggagtccagcatgcttccccagtgctacttccttctggactccctttgccacttgctttctgcttccacccatatccagatgggctgcaaatatgccttgctggttctttactctgtctttgcacaggaggctccctcattttgaagggtcttttgctacccatccatccatccatttggattctataatagagttcttgatgtttgacagaactaggccaggaattgtgggggtataatggcaagcaagacagagtctatccttacgttatggaagttcaattcatttcccatgtggcatactacttctcaccattcagattcatctcgaatattgtttcttctttgaggtttttcccactgcacccaagatactggcctgacactttccttatctctattacagaatttaacttgttcattcattaacagatatttattgcctactatgtgcaagaatctgtgctaaaagctgggaatattgcagtaaacaaaaattaagtttacagcttacatataatgtggtaattatccatcttttaccttcattagactgagttcatgtaggactttatgtaatatctttatatcttcaataccagaaatgcctagaaataatttgcataatatacattttctttaaagatttaacaaaagtctgagggacagttttcagaataaactgaattaaactctctctctcttatgtgtgttatgtaaacatatatataaaatacacttttgggttttttgcttaggaagtagaaaaatgctaaaatttctgttacttacaagcagattaaaatgtccaagaaagaaaagtagggatttatattgattctgctcaaatgcttacctagacaatgtcaatatttatattttactcccctgttgtagtagaatggtaattggttctctagttaagcagcttttttaggattaattttgaagcaagaaattcagattaattaagggacaatttcacttgcagcatttaggcattattttaaccatcaaacttgaagtggcaagaaacggagttgcttaaggaggccagacgtaacattctaaaggtagtagggtcttgattgggttgcttaggcattaaaaggctgtttaacttgtcttgaagtctatctttccttgatgtcttctgcggtaagaacactgtgatacagatggaatgacgggaagtggttttcctttctttcagttggtgagtttgtaagtgatgcccttctcgttcctgacaagtgcaaattcttacaccaggagaggatggatgtttgcgaaactcatcttcactggcacaccgtcgccaaagaggtaccagcccataaattctttcttattgcaaagtgaagatttcctggggacgtgcttaatggcattttaggggtattttgaggcaacagctatgttgataagttatttaagaaaaaaacccagtgctactatccgtaacccagattttagtttttagagtgattttaggttcacagcaaaatcgaacagaaaatagagttcccgtgtaccccctgtccccacacatgcgcagcctccccatccatgaatatttttaaaaagtcaaaaatagggccagttgaactagattcattatgtgcctgtgccgtgtttcgcaacttaaaaatataagttgtctgtgccatgccttataacttaaaaatataatctctaatagttataactttaaagtttacccttcagattatttttatgcacctgttgttttcttttgtcatatacaattttttaataatttagccttttcccctgttatctattagtgaatacagtggtagaacagtgaagtagcttttttataccagcctgaaagctccagttagaattcagtttctcagttataccatccagttttatattcagcaggccatgcctaccatcttgatttttccacagggtgagtctgaccgagcacttggttaacctctgcttttggctaagccaataaaagatgtaagatacttagcatgaaaaggtcactgtgtggtaagaccaccttcacagctgctgtgtccccttgataggtttcctaataaatttatataggtttatttgtggcaagatcagtcttaggctaactagaattaggctcctttatctagctcatagtgcttcacttgagtcaattttgatcccctgtccctcaccggaacatgtctggagacattttttgttattacagcttgagggagtggtgttactggcatctgatagtgcccagaggccagagattctgctaaacatcctacagtcaacaggataaccacccgccacccccaagaattaggcagtccaaaacatcaatagtgctggggttgagaaatctgatctagcttagcttaaccattgtatcatagctttatagctgttagacagaaaataccactgaagatttagtattattttatgcctcttataaaatagtatatttggatccactgtagaataaaatgttttttatgtaaaaatgtgttttggaggtttaagagcttgctgagtttaagaaaacaaaccaaataatttgaagtccagctacctatttgataacctcattttttattccttctgtgttttcaaaagaaaaatcctttgtctctaagaaacggaaatgactcccataaggtcaaaatacagtctgtaatattttcattgtctacctttatgtcttgaattattcatccttcatttatcactagtggatgctctcagaactttatgctaatctagatttgtgcaaatttagcaaatcccagaaaagcaaaaagacattcaaggagaaatctctaatgactgtaagttctgattcttagtggctgcaggggataatttcttctcttcccaggattgttactctgaaagtgaaccaagagagtcagaatttctaggataaggcaggtccatgtgagataaacttccatctgtaagggaggtaggagtgagctggggatctacctggaatgcgcacaatttctggatacacgaattaagccagaaggcattaattctctggtatctgttcaccagtggagactgctacatcttatttcccaattagtttccattccagttgttcgtataaacctctattatataacatcgtggtcttattaaataaataataaacaagaataaaaagagtaccaaagtgtaacccatgctaaaaaaaatcctgttgtaaattcactcaaaaagcaaataatcttttcctttgtgaaattggttcctaatatattgggtctgcatgttgattattttatgtggagttttcttacaatgaaacacatctactctaccactcactgttttctccttacactttgtagacatgcagtgagaagagtaccaacttgcatgactacggcatgttgctgccctgcggaattgacaagttccgaggggtagagtttgtgtgttgcccactggctgaagaaagtgacaatgtggattctgctgatgcggaggaggatgactcggatgtctggtggggcggagcagacacagactatgcagatgggaggtaaggtggcctttgtgttcagcctcagagatgctgaaacatcttgtatggagtatttgtatcctgtaaattaatctttctgtttatcactgaaaaggtctctgcccactcccatcagagtctgctgttatgcaaaaatctgaactatgaatttttatggcatcctgttgaattaataatatcagtcacccatcacagagttaattttaactatttaatattaaacttgggatcaaaatcccactgataactatcataggttactggtagttctaacagggagttgaaataataatggcgttctgttttggtcattaatttaaaaatatttttaaatgctctctgggattgtcagtcattagtttaaggtgaattttcgttaaaggtttggtttgagattttgggcgttctctgtgtggatgtgtaagggtttttttttggccttttatcatttcttttccttcatagtggaagtcaaaggcattaataaatgcttgttaattttttttaactacctttgatttgttgattgtaaagaaacctattttcgcctctttttcttagggagcttagtcccgttacttcttacctgattctcattcttaactgaaggcaaacatctatattcaaatcataaaattataaaatgagaatctttgggttggaaatgccatctggttcaggcattgattttatgctgtctcatcccccgaagggtgatgattgtatcacttatcttattccttcagtattctcttagatgttccctagagctacagatttccaaacagcacattcaataggagttgtaagtttataatcggcaaactacaggatgcttgtttttttttcttttaatttctggtgtaatctgctactagggcccccatagagtttattgtctatatcagctagaacactgggaccacagtcataaactgaaggatccaggcaaactgggtcatatggttacccccaccaattacagtcttcagtgatgatgtcactatccaggttgatattcagttgaaatgctagccagctccttcctagttaccttcatttacatcccatttcagtacctgaacacagtcatgctttagactctgaaattccttagaaatagtaccataaggtttatagctttgatattcctctctgatcatgatcttccctcataatcacctccccagttcaggcttttagtccattatcctctttttccctgcctgcctttctaatcaggatggaatcaatggataaccattcttacctattccattgaacatccttgacttggctgaaacccttcacattttctaaacatatttttgtcaattctccatagctaggaaaaattaatttctttctttagttgcttctgggatttctaaagtatcaagtcatgtaaccttaccacttaattccatttcttattcatgctgtaacatcagctgggatcttaatgttactagatgcacctaattatctctgtcttgatgacctatcatcttccccatagcagttgatccagcccaacttcattctccttggttcccagcgtaactctctctcatgctctacagatgacccctccaccgtcatccattgtgaatttctgcaacatggtacctgacatttggtaggtgcccagtacgtgtttgttgaataaaccattgaattttctcctgtacttcagcaactcttgtaccttcttctatccctttgtttcctgtcttcccttttatgattatgttctgctggactctcaatcatctcctctccctttcttgcattttcagtctccctctcccccacacccccaggcttcatccaccctcctcccagataattctttcccatgtgttactatctttctactatgtgtttttaatcctgttgacagttggtaggaaatatttgatggtttattctacctgtagaaaagtccaaattctcttgcagggcattcagaagtctcttacatggcttcagcctgcattttcagccttatacatgtatgtgactctcctggcatcctaaaaccattgaccttttctttctctaggctttcattcccaccgttctgccccatctgaaatatttttcctttttttgtcaaatggggttaatgtatgataaagatatttgtcaactctaaagtgccacttcttatgacccgtcaaaatctatatatttataaatgttcacctgaaaagatgcagcctttacaagtctttacaggtgccttgctctgctatactacccttgctttacctttttcttataagaccataacttatcttccaattaattgtagtcatatctctttttatctgttagaatccaaactatagtttatgtgtctggtatgtcttgcacataggtcctcaataaatattagacaaagtaaattgtatattttaaattttttttcatagcttttggtaaggacttcatggtccacgattggatattgtagaaagcttatccagcccactgcccaggacgactttgaatgcggaccaacacaaattcataaactttcttaaaacattatgaaatttttttgcctttttttttctataggccctgttatagagcctcccatcttttagcaaagaactgtctaatacaaatgtaatgtgagccacatactttttcgttttctttttttaagatggagtctcgctctgtcacccaggctggagtgcagtggcgtgatctcggctcactgcaacctccacctcccgggttcaagcgattctcctgcctcagcctcctaagtagctgggattacagacatgtgccagcatgcccagctaatttttttttttttgtacttttagtagaggtggggtttcaccatgttggccgggctgatctcgaactcctgacctcgtcatccaccaacctcagcctcccaaagtgctgggattacaggcttgagccaccgtgcctggccttactttttcattttctaatagacagtttaaaaatagtaaaaagaaacaggtgaatttaattttaacaacattttatttaatccagtatatctgaaatatcatgtgaccaatatgaaaaatttaataagatagttcacattctttttttatgtttctttctttcgtaagaagtcttaacacttcttttaacatttaacagcacgtctcaattcatactagccacacactgtgtttgatagttacatgtggctggtgactactatatttggacagtgtagttcctggatgacttgaaatttcttatcactctttatttttccattaagacagacggtttgtataacctagtaatgttttctaaggctgagccactgaatttttattattgtttttaactattcttgtttttaaaatttaaaaaaattggtttggattcagtataattagtatatcaggtcacttgcaccattttattttttaacttcttttcctgtagccctgcaggcgggcagggcttctttcatgtggacaaaaccagaaaggtgttgcatcactgatccacacacaaggtgggctcctgccaactggcagcctccttgttccaggaaccagccctccttttgacacttgaaatgtaaaatcagaatagaagtttaacgtacctgacttaaaacatcttcaggggatgctacgtgacaattcttgaagaaggagaaacgagctaccattttcctggaaacaatatttgattcacagtattttgttgtttggtagttaatgaggcttgttttgatagaagatgagtgtttttctatcgctaatggggcatttagagaaacattccttgtaggatgagctctgttttatgacctcattgaaaaagaggtatgaaaaagaggtaaatctttaacataggcaaaacaggtagtgtttcagaaatttatgtgtaaattaccgagtatatttttctccagtgttgtaatggtcatattctcagatcacctcaaaatacctatttatgcagtctgtaatgtagcataatccagactgttactaacattatgtagcataatgttaataataataattacgtacataatgttaataatacacagactccagccatcgtgggtaagatttttttccatgggaaaattcatttggaaagctaacttgtaagactagccaggtaggcagcctagccctggaggcagagctgctcctcacctggaactgcagaatctgattgaacccagtggtccatgggggttgctgaattcgtaaagcaaatgaaatgttagaagaccctctaattgttgtagagtcacacttttcctcttgcagaggaggtactcacattttttttaagaaacaatctttaattatcgatgtattcttttaggtttaggtttgcagacactggtgagcgtgtgctgagaggtaacttgatgtatctttctggataattagatgattttttttttctatttctttgaacattttttttttaaagagctgcttaagatctggaggagtgattccttttgaccgtgtcttattttcattaagactgtataacttggaagagtttttttttttctttttctttttcttttttttttaagatgaagtttttgctcttgttgcccaggctggagtacagtggtgtgatcttggctcactgcaacctctgcctcctgggttcaaacgattctcctgactcagcttcccgagtaattgggattacaggtgttcaccaccacacccagctaatttttgtatttttagtagagacagggtttcaccatgttggccaggttagttaatgttactctctggtttggggggcagtgatatgttttggcttttttcccacccagatctcttcttgaattcccatgtgttgtggaagggactcggtgggaggcaattgaatcatgggggcaagtctttcccatgctgttcctgtgaagtgaataagtctcacgagatctgatggttttaaaaagaggggttcccctgcacaagttctctctctttgcctgctgccatacatgtaagacatgacttgctcctccttgccttccaccgtgattgtgaggcttccccagccatgtggaactgtaagtccagttaaacctctttcttctgtaaattacccagtctcaggtatgcctttatcggcaacatgcaaatgaactaatacagctcggggtggcttgtgtgggtgcgtatggccatgtatgcaggtgtgcgtgcattggaatatacaattccgtattgaacccagtttaaacttcatcagttctggtgattgctggagtgtcacatatggcaagacgtcaccttgccctctaactacaccagaaaaccaggccagcaccattgactatctagatacagtgggccgtttatattattattgtttcatatttttagattatttggtaaacaatttacagaactaagaataaaggaatagtgagaaataactattagcaattttaataagagttaacatagtaaatattttaattttacgaagaatttaaatatggtaaacccacatgtttattctgtattttcccagttttgaaggtatggatttctgaaatgagcattatcctttggaatgcagctagctgctaatcacctgccatgcacgaacctgaaatatatccgtcttacaaatactggttctacatttcaaatacatctctattaggttcatcatatttcttggtcttttttttttatacttgcaatttcatttaattattgtaaaaatttaagatatttaaaacattgacagctcataattttattgaagagagaatatagccatcttccctcaggaataaaatgttttcaagtttggatttgtaaacagctattaaaatgatcaagccagtctttttttccccctttttttctgcattatctcttctaatcaccttagagagattcctgccttgggcatttgtccacttcctaatggtatcaaataaatgtgttgcacagacataaaatgtgttgcataagcatcataaaatggcaaggaatactgtcacatcattttagcaatgatggttaatgtttttgtcacataatattgagtgatgatatccttcctgttgaatgactaagtggatgagaataccatatttcctttttattcttagaaatacattgctcagccgggcgcagtagctcacgcctgtaatcccagcactttgggaggccgaggtgggccgatcgcctgaggttgggagttcgagaccagcctgaccaacatggagaaagcccatccctactaaaaatacaaaattagctaggcgtggtggcgcatgcctgtaatcccagctactcgggaggctgaggcaggagaatcaattgaaccagggaggcagaggttgcagtgagccaagattgcaccatcacactccagcctgggcaataagagcgaaactccacctcaaaaaagaaagaaagaaagaaagaaatacattgctcacttgtcaattcttgagcttgagaaaattcatctaggatatcatgtgaaggctcatagcctaaggttttacttacgtgatcaatttcattcttcttctggtttatctaattggtaaaatgcctccttctgtcagttgttcctatttgccaatatgtggaagatgatttttgactatattcagtgagtctccagacttctttttatcatgctttttaaagagatgggacctcactctgttgcccagacttgagcgcagtggctattcactggtgtgagtatggtgcattacagctgcaaactcctgggctcaagtgatcctcatgcctcaacatcccaagtagctgggactatgcagactttttttaaaccatcttgaaagatgatgcagtactttgggaacacagcaataaaaatgtgataatttccctattgcatcacctttctaggcaattatatcattctttcatgctcatattattttgtcttctttagcacagtttttaaatagttgatggctaatgatgaaataattcttcggatgataaatattttgtaacataggaacacaatataggaaaaagatcgaggttcataccatatctcagactcatggttaagtacaagctagaatgagttttagtcgattaaatttctttttctctatgaatggataaagtgagaatatcagcccacaagtagttagaagtgctcagaactcaaaggtaaaattgtgtccaagacctgatggtattctaaaggttaacagcctatcctacttaccaagaatttacatttattatgaggcctgtacaacctgatgcaggaaaatacttggcataattttctataagttaggtagttaggtgctcaacaagtatttgagttgaatcacattggcattcacatcaaacacatacacctacgtcatcatgttaacttaaggttaatagtgtcaccaaaactaactggtctttaaaaaagaaaaactaggccaggcatggtggctcatgcctgtaatcccagcactttgggaggccgaggctggcagatctcttgatgtcaggagttcaagaccagcctggccaacatggaaaaaccccctctctactaaaaatacaaaatagccaggcatggtggcatgtgcctgtaatcccagctactggggagactgccagagaatcgcttgaacccaggaggtggaggttgcagtgagctgagatcgcaccactgcacttcagcctgggcaacagagcaagactctgtctcaaaaaaaaaagaaaagaaaagaaaagaaaaactaaggaatatcattctagacatgcagtaattaagtaaaattgcatcaggagtctaataacatagcatgatgggtcccatgtttcattatttccatgggcagaagagggatggctacattataaataaaggaaaattgtaagaataagaaaagatgaagtatgaaatatttccaactcaaaaacaaactgtatctgagcatgcagaggtacaaaatgtcacctttttcctccagtgtaatgaagggcactaaacctcttgagcatttgatatgttccagatactatattaaagtgatttttttttttaggagacaggttcttgctgtcacacatgctggagtgcagtattgcaaccatagatcagtgtaaccttgaactcctgggctcaagtgatcctcctgcctcagcctcccaaatggctaagactacaaacacattgccaccatgcctgcctaatttattttgatttatttattttttttgtagagacaggggtctcactatgttgcccagactgttttcaaactcctggcctcaagtgatcctcctgcctgggcctcccaaagtgttgagattacaggcatgagccaccacgccagaccaaggggtgaaatcttgataacaataatcaatgcagtcatcataaaacgcttgcacaggctcaatttgtaggtggcacagtgctacatctagtcaaaagcaaatttaattatggtcattgtgctctgagaacttttctcagaaaataataaccagatggtattatagatggtgcatttcacaaatacatgatttgtagttagtgaaaacttgtcattcaatcatgtaataaattatgcacatgccgtcttccacttagctagtgatgttgaaacattcatagccttacctgatgagctcaggctgtcatgagaatttatgtctattcagtactttgtctttaaaattaggtgagagagaaagagaggctgtatttgactatatatctttttatttgtatctctggagttacaagtttttgaatatataatctttcagctgcctttctgcattgcattttgagaaatgatattaaatgctcaaggaaaaaaaacctaacaactttagagggccgcaaagtgaatcatacaaaagataaattaaagctttaaatctttgccagtggatgagtcaagtaagagtggatttaatgaaatggctcatggctttgagaagcagctgtcataatgctgggttggcagcttccaggactgtgtgaggctttctgactgtctatactgaaataggagaactcatttgaaaatgacgaataggagaatagcagaaacttgcattttcttttgagggaactggctgccagttttgaggtccttatttagaaatgctcgattcctgtattgaataaacttggactacatgtatgtcaaaaagaaaagcaaaacacttttatagccttaagcagattacagatgtgtggccaaaccagtggggtctgtttttgtttccaagcaggtgatggctggaagaggagatgcctctgtagtgcagggcttgagttgctgctgtctgagctacatctggcaatgagactgtgctgcttactgagacctaatggcacaggttgccccagtaacaggatattgctgaatgagaaatactgtaggattcatttgtaagagttatttggagggttggattattcagtgctaaggatcctaagctactgatgcatggactcttttcttccctccagtatcttttaattaaactgtacaaattccctggcttaaaaatagtaggaaaagaggaagaaaatacagattcttatgattttaactggtctctggcaatagtacaccgaaacattaatttcttgttgaaaccatctggatatttgtatcttcagtgtaaaacccctaatttagataggactctccattgtgacatggaaaaataaccctttaattagttaattaattttactgtggcctcaaaatctacatattagcatatcaagccaaaaactgttggctttacttgggagccatgtggcttaaactagtaccagtaacttaccacaaggaactcagcaaaattataagtccatgtttgttttggaaggaaggcaattattacgaaaataatttagagatgttcaaactatttcctttgagtagaggtagagagtgaacaaaatctgtcccaagtgggagctaactagcttccttttttgccctccctgtttacaaagtaacacttttagtttactaggtaacatttgcagtatccccagtgtttcaatgtaaaattgtaggtggtagactaatgccacttagccaaagccatgatcacctgaatttttaatatatatttttgtatggagtgagatactgggagaacagtcttcattagcttaaactctagaatgtactgtttgtttgtttgtttgtttgtttgttttgagatagagtctcgctctgtcacccaggctgcagtgcaatggtgcaatctcagctcactgcaacctcccctcccaagttcaagtggtactcctgcctcagtctcccgaggattacaggtgcctgcttccacactcagctttttttttttttttttaatggagacggagtctcactctgttgcccaggctggagtgcagtggtgtgatttgggctcactgcaacctctgcctcccaggttcaagcgattctcctgccttagcctcccgagtcgctgggattacaggtgccaaccaccatgcctggctaatttttgtatttttagtagagacgaggtttcaccatgttggtcaggctggtctcgaattcctgacctcaagtgatccactggcctcggcctcccaaagtgctgggattacaggcataagctaccatgcccagccaagaatgtacaatatttttaaagaaatgcggtttattaccataaaatacaggttgagcatccctaatccaaaatctgaaatgccctaaaatccaaaatgttttgagcactgacatgacagcaaacgtagaaaattatgtgactttatgtgttcaatgtatacaaacttcctttctgaaacaaaaattatttaaaatgttgtataaaattgccttcaggctgtgtgtataaggtatttttgaaacataaatgaattttatgtttatacttgggtcccatctccaacatatcttatatgtatggaaatatcccaaaatttgaaaaaaatctgaaatctgaaacacttctggtcccaggcagtttggataaggattactcaatctgtaaatacagtagctcaaattgattttgtaaggcagtcaagttattatttatagtattttaatttgtattattcttttaatatagcaattcattttatatatttatataaataaattttttgcaattgagcaaattaaaaaaattaagtgcttccttcagatctacattttattttctatttgttatcaatttaataagtaaaggacacacagatcatctgattgtgttgtcagacatttgaaggtgcaactgatgaatgttcactgttgtactttgttttgtcatgtaaattgttttaaagagaagtgaatgttgagcatatagtaggccacacgtgcctgtggattggctcattgttttaggaatgtgtaattctggaaaagatttgccaagggtattcaaaagtatagtttgatattagaaattatttgaaaataatctttatagcatagcaccattttatttagatcaatagtaattcaagcagtatacataatttgctattgtaagcgtagcatataacctaagttttcttttacatttgagaccactgtttgctgttggtcgaatttggtcttccaagattttttgcttagtgacctaattgccagcctttgtgaagagctgttacttattgtcaaaccaggcagtaagggtttgcttttatctttttatcagttctttcaatgctagtagtcatgagattaatgtagttggatactaaaatgttaatacgtgttagataacaaactgggaaagagatgaatgacatcatgaaggaaagggcagtattgcacttacagtgatttcatgatgatagaactaacctgcctaaaaagacattgggtggaaacagaaaccaggtgtaatagacgcatccaagtagtcaaggaaagaaaagacttgtaagtaaataagataatctttgcttcaaaaatatcttcaaaggtttaaaatgtgctttaccctcatatataatctttttgagcctatttctttacctcaaacatggggaaaattgcaataatctgtatcacggtatttgcttccaaaacgactaattggtgtaaatgcatatcaagccggtaaagtttacagtggacttgtttaaaatgcgtagattggaattgttgggggagcaggccagcagcatgggatgttttttttgtttgtttgtttgtttaagactctgtcgcccagactggagtgcagtggcacaatctcggctcactgcaacctccgtctcctgagttcaagcaattctcctacctcagcctcccaagtagctgggattacgggtgcctgccaccacgcccagctagtttttacatttttagtagagacagggtatcaccacgttggccagactggtctcgaactcctgacctcaggtgatccgcctgcctcgggctcccaaagtgctgggattacaggcgtgagacaccgcgccagctggggtgatttttttcttagtcaaatcacttctctacccatcatctcacactgtcgaatacaaagactctccttggggctcaatgactcatctcccacctctggtttgataatcatggctattataacatgttccctttttaattagttattttaaaattattgtaggtcttgtaatcataatcaataataatacgtaatggctccttaagcacttctatcctagataaggttgagaacattattaaaattagttttggtagtaatcaagtaatgataattcttatttatgaatttaaatatgtaggagtttttttattttagggaagcaaaaaggactagaaagtatgatgtctcatgattagaaaactgctataaaaatgaaggtagaattgatttgggctgttttggacattttaaatagaaatttaaataggtattcaaatagcaaagtcattctactttaaaacttctatacttttttaggatcttcaattttatatttaaattatatttttgaaatggttttagaagaaatattgtatcttaaactctaactactaataagtaagagaagatatatcaaaggtttgatcttttatctcctagaatatactattcattcgtttcccattgtacgtcatttgaatgttaatggttagcctcaaatggttttcaacataattgtatagctactattattggaaaattggagccaaggactcatacacatatcagaagtggtaatgaagcactttggttttatgaaaatatgtttacaaggtagtcacaggatagcaatattgcatttactgtaatacaatgatggtggaactaagtgcagtggaacaggatgctgagaccacagttaccgcatctctaagtgcctcgtctagttatggtccaacctcagatataactcattggtgttgaaacacacctagcaacattttaagcatagaccgttcattaaaaggtacctttttaaaaatttttatttttaaaaattgacatgtaataattgtacacatttacagggtacacagtgatcagatcagactgatcagcatattcatctcaggcatgtatcatttctttgtgttgggaaaattcaatatcctgcttctagctgtttgagattatgtcatatattactgttaactgtagtcatcctacagtgctgtagagcactagaacttattcctcttatctagctgtaatttggtatcctttaacaaatctttctctatcctcagtttctacctacccttcccagcctccatcatcctctgttctactctttacgtctatgaaatcaacattttctagcttctgcatatgagagcatgtggtgtttaactttctgtttttggcttatttcacttaacatatgtcctccagttccatccatgttgcttcaaatgacaggattttattcttttgtatggcttaatagtatttcattatacgtgcatgcacgcacggacacacacacatacacacacacacacacatcacattttcttcatccattagtctctttggacatctaggttattccatatcttggctattgtgagtagtgctgcagtaaatatgggagtgcagatacctcttttaatatactgatttctcttcctttagataaatgcccagtagtgggattgctggatcgtatggtagctctatttttagttttttgaggaatctccatactatcctcaaatggttgtactagaacagagcttttttaccttccttccatttgggaatcttcttacccaacatgtatattagtaacttggctatgtatgttccattctctgtctcaaatactgtgtctaggacatctgcaatctttggctatgaccacgactgtaaagtgcatgacgcttttgctctgtcatcagtattagttgacaggcaagtaagatagtacttctcttcataacccctttacctgcccagcagaataccagtacagacagacccagaatatctctgggctcaagaatccagacatttataggatgggacttttatctataaatcaccttaagattagtaagttcttagaattggttacctttgccatttctcagaagccctttgtctagtaacctgtgtgtcactgtcatttccagcctgtctttcctacacattgtttatgcaggctttaggagtgcccaccccccagttctaccccccacccccaccctagcctttgtggttttaattatcctgtcttggctgattttgttttgttttgacatttcatccattaaattcctgacactggctatctctttacaattattatactatttttctttctggctcgctcttcctgattgctgtaatccatgcccttgactttaaataccatttgtaagtagactaggccaaggtttatttctctaggccagactctacctagttatttcataggcatatgaatcctaacatgtccaaatgagagttcttaattcccctgctacccagtcctcaatgtggttctctcaaagctattctatctcagtaatggtcctatgccctctcctagggattattgctgagaacctagaactcatcatcgtctcttctgcacatcctatgaattctggatttatccacttatctccatcttttccagcactaatctaaactcccattgtttcttgctggagttatttccgtatcctgctaatctctgctctcgttctctctccctgacacatgcgctgctttcttctcccacaccaagccattctctgtacagcagccaggatgtagagtgtttatttacataaagcagatcctggaacccccaaatttaagttgtgttcgtggcttaccaatacgcttaaaaaccaagtgcacagagagaaaacaatgaagccttatttggatatgctgaggataattgataacgggtaacaactaacaaacacgtagttggtgtcaggtttgacctcctacattccttacaggtattagtgtatttgacccagctcctccctacctccgcagtatcaccccatgcctctctttcccccgactctcccctgctcagtgtcacacaagtcaatatccccagcttgctaacccccgggctgacagatctcattgtctataatggatgttccaaggtcccaccttcagcctcagttttgttgccatctttccagaatgaattcccttgatcattctgttttttggagacaaggtcctgctctgtcacctaggctggagtgcagtggcatgatcatggctcactgtagccttgacctccctggctctggagatcctcctgagtagctgggactacaggctgcacctggctaatttttttttaatttttagtggagacaagatctcactttgttgcccaggcttgtctcaaactcctgaactcaagcagtcctcccacctccgtctcccagagtgctagaattacaggcatgagccaccatgcctggccctgatcattcttttctgaagaaaacaccccttcttcattattctcaatcctagcagcctatttacttccattctgaaatgaatcacattttagtattttattggttcgttgtcgttctctccccccatagaatgtaatctctctgagtacagggagcttatctttttcccttttggagcctcggatccagcagaatgccagacacttagcagccactagcatttgatgagtgaatggcttttcatacacaattttagacattgttcctgattggtctctctagtcaataatagatttatcaaatctaatcgataatagatttctttttcttttctttttttctttttctttttctttttttttttgagaagtcttgctctgtcgcccaggctggagtgcagtggcatgatcttggctcactgcaggctctgcctcccaggttcacgccattctcctgcctcagcctcccaagtaactgggactataggcgcccgccaccatgcccagctattttttgtgttttagtagagatggggtttcactgtgttagccaggatggtctcgatctcctgtcctcaagatccgcccgcctcagcctcccagagtgctgggattacaggcctgagccaccgtgcctggccgatagtagatttcttttattgattagagagactaatcagcaacaatgttttaaaattctcacatagatctctgaatgggaaagcagtcttgaattatgcttgcagggagagagaggggaaggaaggaggaggaatggtataattagacttcataaggctagattttgtttctacttaaataatggtatcacagtgggacatattatccatgcagaaagtgagtgggcatctggtctattatctgtggtctttcaggaatggcagctctttagtttaaaaaacaacaaagtgcagcactgtttatttaatggaaatagaaaagcagtgcctgtgtattagtggctcagatttttttgttctttgttttcagctgtctgctgtatgcctctccagcggggtcttacagaatctcaagtctaccatgatcaaagctgaacccattagctccatttcttaattcctcctgtatcctctgttaccattagtaactattctccaactcaaagcatcagattcctcctcttactcactcccttcatccccagtcaccagttctgtgctgttattttatccaagttctcagtaggcttcacgagcaccgccttcacatcccaactgtcgctcctccacctatctgtcctccatgcttctgctagctcatgtttgttgcaatacaactaaccttgccactcttctgcttcaggcttttctactaggctctgcatctagatgatggtccagactcctcagcctgtgaaacaaagcccttcataaaagagcagagctacagctagtcagctcccttcctgcagtccaccccctcctccaccatactgagaattggcaattcctgtagcactctttgtatgagtccattttcacactgctataaagatataaccaagactgggtagtttataaaggaaagaggtttaattgactcacagttctgcatggctgaggaggcctcaggaaacttacaatcatggcagaaggggaagcaaacacatccttcttcataaggcggcaggaaagagaagagcgaggagcagagtgggaacagccccttataaaactgtcagatctcctgagaactccctcactgtcacgagaacagcatggggaaaccactcccatgatccaattccgtcccaccaggtctttctctagacacatggggattatgaggattacaattcaagatgagatttgagtgaggacacagccaaaccatatcactcttcatctgctacgggtgccattccctgtttctacagtgtcctgtttgctaccttctttgtagatttctattcattcatcatgtcccagtttacctgttacctcttcaacagattattcttcagtctgtccctcccaaactccaccaatgaacattctttgttcagcccattattgttaatatgcacttcactgaaaacactgttttatgcttgtttacatcccatctctgcagggctctgagcctatagtcagcagttgggaacttactaggcatagcgcccagtaaaggatagctctttatatatatatatatattttttttttttctaaaataataagccccaagaaaaacattacctgtgaaaaacaaatgatatttttataccattttcaaaacctaatagcaataaaaagaaaagaaatgtcataagtatacatttaagctgtagttaaaaacagtaaataggcacagtatttaactcttatcatgtgctgttccaagtgtgttatttacatcattggctgttcacaccatcccctgaggtggttaatatttccatcccatgttaaagatgaggaaaccaagtcacagcagcctaagtgacatgttcatagtcacattggagctggcaggtggcagcactgagaatgaaacccacgtggctgagctctggaaagtcaccattaatcaccacactagaccttctctctaggatctacataactagaacatacaattaactggagtatatgtaagtgtagtcgttccttgagaaaggaaaagaattcacaaatttcatagcctcatcccttgtgcatttgtggcattgtgctaggggtgtctatttgatatttgaccctacagatttctcagatgccaaccaaccacagatactttaaaaaaagatacttaatacttaccaatgcaagaaagtgggcttgttggaagaggaaaaatgttagctcactaatggaaaatcaactaaaagtcttacctctccagaacatgcttttcctaaatgttgtggctaacccaagaagctacatcatctttacctttatgatacaatttaaagtacttttctacttacttcaagccctcagagcacagaggcaagggaggccttgggctataaaccctgtagcctgagccacatggcttcttctcctggacagatacctggcatattctgccactgaggatcagtggtgcagatgtatctgttttctcctaggaatggggctccacttacgaatctggggcaggacaaggtattgctgcattttggggagcgtgctggaaggaggagcagagtttgttgtttttgcttcctgatatggactggctgtgtctccattcaaatatcaacttcaattatatctcccagaattcccacatgttgtggagggacccaggggaggtaattgattcatgggggctgatcttctctgtactattcttgcgataatgaataagtctcacaagatctcatgggtttatcaggggtttctgcttttgcttcttcctcatttttctcttgccttttcctcatttttctcttgccgccaccatgtaagaaatgcctttcacctcccgccatgattctgaggcctccccagccatgtggaactgtaagtcccattaaacctctttttctccccaatcttgggtatgtctttatcagcagcatgaaaacagactgatacacttccttaacagaaccaattattttttcccaaaaaagagggggagaagcccagaagcatgcagcttctctcttctttctaaggaataggtcttcacaaagtgcccccaaaagaaaaggaccaggcttttctcttactttgtgactttcctaggttgctttgtagccattttggacacagaccacctatagctgtgtagtagttctcatgtgtatggacacagtggaaggagatgccaggcacatagttcttgctgcattgacaccttttcagggcatcttcttttaccatcttctgtagaaactgcaacagcccggccaactaccagccccagcccacccctagctttgctgctttcattttctctgtaacacttgtcaccttgtaatgtgctagtgtaacatcgttgttttagttttcttatatctttccttccctgtagaatgtaaataccaggaaggcagggaattttgtctgctttattctctgcagcatccctagactccagagcagaccctggaactcaaatatttgttagacagccaaaggtcatatacttccaactctccacccaaaatatatatggatcacccatccttagtagcagctaaacctttggacatgaggaatttgctcgttcacagttttctggcctagcatctgattaaccaaactttttcacatatcaagaatttaaaatgactccaaaactttttatgaccttaggtgcttctccttaattctagttggttcataaagctgtcagaacaataatctgcttttgataatatatgacttttcttgcctccaagatagcctttaaaaaagcaatttagccttttactgtaattatattccaaatttaagtcttgccagaatatcattttccccctttaaacatactttttatgatgccaagatattttaaagaaaagttcagataggaagcatatttaagatgtcagtatatgtctctaaaatctaagaacatttttctacagagtccagatgataccatctcacccacaaaattaacataaatttttagtaccattggataccatgtccatattcagattctccctgagttccagaaaggtccttcacaggttatgcatttcacatcctatccggcaccagggccagcatcttacatccttaattcttaggattcagaatagcactttttatatcctgacactgacttgctgaagaagctgtaccagttttcctataaactgtccactccttggatttgtcttatatcatgtcccaggggtattgtttagattgttgctctattgctaggatattcatgttaccctaagtgtgtactgagatagcagagtaaagagagattgtcttttaaaggttctgcccaggaactgctggtttacacaaaagctgggctttagtgcttctcggatctctttgcttgtttcagtaatttttttttagaaattcactaattcactaacgtaagtggggcagggtttacaggagcatgtgttgagagaagttggtttgactttaaatggtcatttttacaatccgtatttaggccttacaggtcgcatacaatctctgtcacatattgctgtcatttttaccccctttcttttctttttataatcctttaaaaaatgcaaagcccacccttagctcacaggatgtacaagaacaagttgcgggttgcagtttgccaagacctgctctgtgccactgctgacttgccattcttggagcccactttctgttcttgtcagccaattccctttcaggtgctcaggtttccctccctcctgtcaccgggcctttgcacatgctctacccaccctgcctagtggagagctatctttggcccctggacttcattcacttcggaccttctttgggtcacatttcagtcatgcctcactagacacctggaatctctgcctcactagacacactagcactcactcttttgggtcttctggctgtatgtaattgttatcagggcagtaattttgcatttatacaggtgctgaggtcagtgtctggcctttggctacttgccttgtgagccacctttgctttccagtgtacccctagctcctggcccagtgtccagcttcccagcatccattcatgttttccctggagaccattctgtgcccagcagccagagacatcattgcaacttaaatctcattgagtcgttccagttgctgtaagaaatgtaaccgtactgggtaacactatgcctgtctgtctccaccaccagatcttatacttcctccctcatctgctactccctaagctcactggccctttgttgtttttgctgaacgtgctaatctcttcctcacacctgggcctttgcacttgctcttacccctgcctcagccatccatgcactctcttggttttgccgtgcccgacttcagcatttttagttcacatggctcttccgtggggcccttccctgaccaccctgtttgaaatgctacccatccctggcacacatctatcatagtcattcattagcaattagccccatctcctttccctatagtacttttccataattttttttcttgctcatattacacctccccaactaatagatagattccaagaaattgagtgctttatcttcactacctggaatagtactggcacttggtaaagcacagcgaatattgttgattgaattactaggggttggcttagagaggtacttaatggaatgattcaatggatgaatgaatgaatgcattgccacttttttgctcattatcatcaatttgtacatatgcctttcaactcaaatatttatccattggctaaagaaaaaaaatacctgaatccccgtgtctctgcagtttacccttcctcactgttaaaactcagtgcctgtgtaaaatttcattatattttatttacttcttattccacttgtgcattatgtggatattcctgcctcatccccacagccacctatcacttccggccaactcagatgcctctggctcgcaacaatcacttctctgttgaatttctgaagcgtttaatctgcagtatgtctgttactcatacagcagttagtgtgaattgtctcactcagaataagtattcattaaatgtgtaagaatgatgatatagcctaatttcagatcaagattgtgatttatagctcattcttaatcagctgtgtcatgactttatttatttattccttttttttttttttttgagacagagtctcactctgtcacccaggctggagtgcaatgcagcttctgcctcctgagttcaagtgattctcatgcctcagcctcccaagtagctgggattacaggcgtgcacccccacgtccagctaattttttgtatttttagtagagacggaatttcactatgttggccaggctggtctcgaactcctggccccaagtgatctgcctgcctcggccccgcaacgtgctgggattacaggcatgagccacctcctcaggcctgagtcatgaatttttggtagtccagtcatgtggttatcttcctaaagctggaggccttaaacctagggccccaggtgggcttatgcctttagctgcaagtaacaagaaacccttttcaacctttttactgatttatttagagagaagtacacataagaggtaatgcaagtaagcaaagttttttaagaccacacaactagatagccagcatccggaccagaacacagagacttgctggcccctagaatcctctctcctggcccctgccagttactggcctttcccctgagttctatttgcctgcagtttgcttgttttcatatttaattcaaatagaattaggtgatgtgtccccttgtgtttcgcttctaacagtgcctttatgcgggagaagtactggctatttcttactttgccctccctccccggaaacattttcctaatttagtagcagtaatttcaaaaactgctttcctttcggacaaactgacttatccagccattgtaccttccagtttagactctggcagtttggagagttgagacagagagaaggagaaccgtctgtttatcttcttgaaaaaaactactgtattttctctctcttctgactctgggagcctctagactcttttttcccattttcatatccacagaggaagagtctgaacctcttcctgctgagctttcccctggttggttgcatttcaggaactgacattggttgtcttccctcttccctcatcagtgcaagtaggttggatctcatgatagtccatattcacataaccatgagaatcagagctttctctctgtcatttcctccctgtttatctgtagcaagaagaaaaaagtccgtcttaacagagactgtgaaagaataaatatagactttattgttttagagcagttttaggttcacagcaaaattaggcagaaggtactgagattctcccatatactccctgttcatacacttgcacagcctctcccattatcagcgtcccccttagagcgatttgttacaatcagtgaacctacactgacaccattattatcacccaaagtccatagtttacattagcattctctcagcattgtttattctgtgagtttggaaaactgtctaatgacatgtacccaccattgtagtgtcatactgagtacttttactatcccccaaatcctctgtgttcctcctgttcgaccctctcttgcctttaacctttccaagccactgatctgttactgtctataattttgccatttctagaatgtcatatggctttcttagaaaatacaaatggtgacttttttggcatgactttaataaacagaaatgaaaattggtgtgtgaatcaaaatctttcactctgtaaagggacttatcaggcggcacctgcatgtggaattatatcaaggtcagctttagttagaaacagaaggagagtcacctttgtgatgtcatttctccttcatccaagtaaaatctcgcatgctgacacataaaattttatcatcagtgatttatttcctcgtaggaatgtccctttgaccttattaaattcagatactctggggatggtcagcattttcagatggttcccttgttctgtaaaaatgtttgttattggtgtttaaaagctgtaaaagccacccactataaattgatagccactaaagtctgcgaatgtggtatgaatgttccactatgttgccaagcgtttattttattgtgagttgttatttgattgtttgtaaggaaattgttttatgatgctcagctttatatttccataaactgttcctcccttgcaactccttaaactgtgatgagcttttcaaaacaagtccacaggacaacagtctgtccagcatttgaagaagtggtggaaaagtcatttttttcctttcagtgtttctagctgttcatgaaaactgcagttaaaagttgtaatgttgttgtgtttggcattctttgggaagatgcagcattattcaaacaaaaccgtgtgctcttgttttaaatagtgtccaaatgaataattgaattcatggacatctaaatttaattccagaaatcaaagctatggtaataagaacttggacctgagttctcttaggccaagtaatttaattccttagccggttgaactatttattacgtgtctccgttcctggttattatgccagtaaattgctcaggcagatgcagggatggatgatgggcatataattcactctttttcacggctagacacataccagaatgcagatcacactaaacagctgtttttacaaacatggtttctattcagagctttaagggccacatccaagtaataacaaagaagcctggagaaggaacctggggatacccagggtcatgttttcaccatcccacctggaaacacggtgctgtccaaaccctggatggtacacttggacatcgtcattccagtcatggttcaagatcacgtgtatacatcatgatttaaagagaatactggtttgatttttcttcctgactttccctgaattttccacttaaattggaaaacagcgctagttagtgcccatgatttgattgaataagtaagagatctcaaacacggtaaattaactgatgacatgcatcaggtcatctttctttgattcaccagtaatacaacagtgagatcctacagaaaaatgcaaaggcagaagctcagggcagctgagcaactgttaaggattcttttgaaatgtagccccacgtagtaaactttcgtgcaataatttgggcagtcaaaaaaaaaagtcagttatttcacctcatttatttctacgaggagataaaggcttccaacatctgattttcagtgccagtgttttctgtttctcttttcacctatttcgtcctagtcttgtggaaatgttacaataactgattaggattttctctgtattaacacttcatttattaacatatgagtaagttgctattaataaattattctgcttaatcagtttctttttattctttagccacatgctaaacttcttcggatgtcttcacttaatatccttacatcatatttaatcagagttagaaaggcgttccacttgggggtcatacacatttttttgaaacttttataaacgccctttatactattcttgtatcctacgtaatcagagtcaggtgttccatggggatcatacacatctttatacaacttgtgtaacacatgctttaaatcctgaggtaatcagagaattcctgccattgatggattaatctctttacatatctttccctttcactctcagcaaaactacttatggcggtcctgttagactttgaaagcctttcaggtttatggaggagtcttcctttctattgtcgtagatcatggaatcatagtgttcgcttgtctcacgtgtttggaatctgatttcctacataatgctgtgctctcactacgagtccaaggcttcctgtggctacaaatcccgggttcctatcacttttcccaatgatgagcttctccttgttggccagaatcagctctgtggtaataattcccttctgctttctccctctcgcttttttttttccttctgggtacattataatgtcagcatagcagcttttaattctattactatggtacttctcgaatagacctgtggtagttgccccagaaaggttgaaaccccctgccacatctaggtctttctcctgtattggttttgtgatctgatcaaggacatctattcctctagtcctgctaggtggtatacgataggcttttactattagatattcaaatgctgtcaaccatgcctgccttgacaggtacatgatttccacaaggatttcctaataggcctttttaattttgttctagacatgcccttcttttgccatccaaatttgcttattttttacaaactatgatgcatcagcatgtaaatgtttaataccataaatatttctgatcctcttcccaatttcactgagttactggttatctcttgccattattctcagcatattgcagtggatctcagaatattttcccctgaccaccagcatcagtattacctgggaatttgaaatgcacattctcaggccccaccaaggcctcatgattcagaaactctggagctgcattagaaactgccacaggcacctggtgatctgtgttggtttttgtttgtttttaaggagacagtgtctttgtctccctggctggaatgcagtgatgcagtcatagctcacagcagcctcgaactcctgggctcaagcaatcctcccgccccagccttctgagtagctggaactacaggtgcacaccaccatgcctggctggtttttgtttgtttttaaggaggcagtgtctttgtctccctagctggaatgcagtgatgcagtcatagctcacagcagcctcgaactcctgggctcaagcaatcctcccgccccagccttctgagtagctggaactacaggtgcacaccaccatgcctggcttttttttttttttttttttaatttttttggagacagggtctcaccgtgtggcccaggctggtctcaaactcctggcctctaggttttttcccacctcagccttccacagtgctgggattacaggcatgagccaccacatttagcaggtaggtgatctgtgtttcaataagccttccaggtgattctgatgctcactgaaatttgagaaccactgaaatatttggttttctacaaaacataagcagttagtaaccatagggtacgcaactaaatagttccagcaggcatccctgaccacagggcattgcagatttacttaagtcagtttcatcttccacctgtgtgagttccagcaggcatccctgaccacagggcattgcaggtttacttaagtcagtttcatcttccacctgtgtgagttccagcaggcatccctgaccacagggcattgcaggtttacttaagtcagtttcatcttccacctgtgtgagttccagcaggcatccctgaccacagggcattgcaggtttacttaagtcagcttcatcttccacctgtgtgtccagtttaagctctcagttgcagtttttaaaccaatttccaccagcatatactgagtatccgctaccgtgcaatgcgttgcggctcttgtatgtgcactatgagaagtaattcccataatacggcaaactcagttttgatatccaccaccccactttttataatggactacatttttcagagcagttttaggtttacaaagaattcaagcagaaactacaaaaagttccctctacctctcacttccccactccccaacagtttcccctggattaacattttgccttagtatggtacgtttgaaccaatatcgatacactattattaaccagtattcctgttttaacatgagaggcgactttttgtgtagtatagtctcttggttttgacaaatgcttaatgctgtgtatctattattacttatgacagtatcgtgcagagtagtttctaaaaatcctctctactccacctattcatcccttccccactccccctgaaccactggcaaccgctgatctttttattgtctccgtaattttcccttttccagaatgtcctgtggttagactcatggcatccccttttagcaactgcagaaactaagaactgtccccaaggataaaaatttttgcagacccactgagctgggatttatacttagacctgctgaattgaagttttgggtgtgtttcttctcaaattgccaaaattccatatggacgacttttcttttccttccctgaaatgtgtttaattgactttttctgttatttgtgtttgccttcacagtgaagacaaagtagtagaagtagcagaggaggaagaagtggctgaggtggaagaagaagaagccgatgatgacgaggacgatgaggatggtgatgaggtagaggaagaggctgaggaaccctacgaagaagccacagagagaaccaccagcattgccaccaccaccaccaccaccacagagtctgtggaagaggtggttcgaggtaatccaccatttgcttggattccccccacccccaaggaaaagaaagcgtaataccagagttggaaatatccaccctagcaccactgccttccccaatcaaaaacatgtttttttttccaaaaggcttcttatgcttgtgaaatttttttggtttaacaagcaaacaatttcaaataatgtgaaatctttattatacagtttgttttgtaccttgtatatgctgcttggcaaatcccaagttaattctacaagactccgcccaaccaggtagtcatctaatttgacaaacactgagttaggtgactccttggtattcctttggcagtgagtgtttgttatataatattgtctgttaccacctagacgatgagctccttgagggtaaggacttgattttattcagtattgcacagagtgcctggcttgtagtttcgataaatcttagttgagtgagtagttgtgattagatttcattaaagaaggagatttgggccaggcacagtgcctcacacctgtaatcccagcactttgggaggccgaggcaggcggatcacctgaggccaggagttcaagaccagtctggccaacatggtgaaaacccatctctactaaaaatacaaaaatgagccaggcgtggtggcacgcacctgtaatcccagctatttgggaggctgagacaggagaattgcttgaacccaggaggcggaggttgcagtgagctgagatcacaccattgcactccagcctgggtgacagagcaagattgtctcaaaaaaaaaaaaaaaaaaaaagatttggtgagtatcgcattattttatgctatgaattttaacagaggtgatttatgttgagtttacattgttttattgggaagtacggcagtgctttcttcaagaagtaaatatagtattaatgtcttagactttctctattgaattaatgtttgtgttgcaaatattgtgaactaaaagaactaaaggtcatacttgtctccatgaaataaaaacaaacattcagttgatattaaatgaccaaatgttacagaaacgagtaaactgttggattgagttccttaaagagtatgcatttgttccttaaagagttctgcatttcatatctgccatctgcttggcagatagtaaaagatgcttctagagctagattgaatgaatatgtacttactgaattttaatgtactgcaaatacttataaaggtcaaccacaaatgttacagcatttacaaaaagtggctttctctcactttttgctaaagtttaatgatttcagatttattgttctattagagcttaacatgggctattttgtctccctcaactatattcatagttgtcactatagtattttcttccctttgttgcattttttaccttattaaggtgtaatttacatataagtttcatttgcttttaagtatataattcagcggctttaagaaatttgccaagctgtgcaactatcaccataatctaatcttagaacattttcgtcactccagtaagatcacacatactcactcccagttaagccctctactcacctctagccccaagcaacaactaatctactttctgtctctatagatttgcccttttttggactgttattataagtgggatcatataatacatggtcttttgtgtccgacttctttcacttaacacagtatttttgaggttctacatttctttaacttgagcttttaaaattgagattattctgaattaaacactcagcgttagcttaaaatttattgaaagttttacatgttctttgaaaaaaaagaacagagtgcaagatggattaagtttatcattccctacttaatgacagtttcttactcactttagcacataagtaaatgtgctagtaaatgcgcattttgtttaaaccaccatttttcaaatactgagacatgctttctcagggtgtttttcatacaactgttaggaccaactatggcagatctggtcaaatgaacttgttagcctgatgcctgtagcagggaaggacagcttttcagggcttctcttctcgaaacctaaatgaagtgtgaatacaaattacagcagctagcagcctgcagtgggactgaaagtccttggtgaatctccatcaagctgggctgtttaatagaaccagtttagtgtcccattttacttgaaacattagattttgagcacctgcttggtacaagccattttgctaggccatgtggaatggatgatgagcacacacagaccagctaaccctagtggatgttaaaatctcttaggaaatagaagtcaaagaagtacaaagccatctgtgttgtaagaaatgtgaacacagaacctgcctccgagagtaagagggaacttctggattgatcagagaaggttccatggagagcatgacatttgaactagagccaaaagtgtgggtgggtggtgtgtctaccagtggattttgctgtagagtcatcaggactagcaaaacaaatgtggtgccatggaaaggcatatttaggagacaggattggtccaatttaagctagagcagatgtcttttaggttgggaccaaaatatagagaccttcaatgccaggctggcaaagatgggcattaactgcaggtgattaattaacaaatattaattcagaagctactgtgcgctgcagatttttccaggagacaataaagagattttgttttgatgctagtactgttgaggtaacaggtgaacaaggagtgacatcagttatgcagtacaatgagaggatgccacataaacttaggcccatattctagaacaagacaatttgcttgagataaattggtctcattatcgtctgcattagtccagttctttttgcttgagttttgcaggtagtattatttgatattaagacggaacacagagatgttgtattgttttatttcctgtagaaagacgaaggcagttaaaagaatttcataaacaaaacactccaggctaaaggcaaaaaagaaatgaaccttaaaaaataacaagttaataattttgttggcaagaagagcaacaaaagcaaccttctgaaagcaagatacctggtcattgagagatagcaactgttaatgccccagaaatagaggaatctttaatgcaggtccattcattccacctcaaactcctgaacaaaagctctaattgaggcaagtcttcctgggaaagggggcctaacagaaacatgttatggtcagttgtgcccatgcgagataatttttttgtgcttgtagctaattccagtaaagaagtagatgttttagagggtaacgttaaaggggtcagctgcaaagagtccttttcctcctcctcactgttacaaaaggtgacttgtggttcttccctaattgagagcaatggcaacgccataggtgattactcattttgtaaaactctaattacaagtaggttgcttctgtgttcaacataaaaattagaagtgacttgcaaagatgagatactgcagggaggcttacaatcttgttttcagtgttagtgtttcagtacctggaacaaaatgtgatttacagccatcctttctaagaaaattgtcatcattaccaacatattgctactgataccagtccttaatgtgcttcataaaaaactcaataatttcataacccgttaaaaccggaaagaaatggagggaagaaaaataagacacttttagcgtagtcataatcttctctgccatattgtgttagaatcgatgatacccaaatgagaagatgtctgttctctgtcactgattccagtagaataaaattattgtttaaaagtaagcacatccgctgcactccagcctgggcaacagagtgggaccctgtctcaaaaaaataaaaataaaagtgagcacacgattgcaagatctatctggttttgggggcttattgtcatctttggttgttaaaaaaatacttggatattattggttattggtctagtggaataagccattaccgatttgagtacaacagtggtgtatttagatacttgctcctaattttctgttcttcaagaagggattgtacttcagaaaccagagatatcagggtagttttgattgagccataaattctaaattctgattgaaatgggtattgtaataaatggcataatcttttatttaatctagccaattgtgccctgtccagaggaactggacatttcttccttatgttccatttattcagcaactattcgttgtacccctgctgatggctaggctctttgctactgtggaaggcatcgttggggcagagcagacagcattttacctcctgggagactggcagatttttgaagcctttgttgcagatatagattttcacggtcaccactcttgccctttaatgtaatttaaatttttttttttttttttttgacacgggattttgctatgtttcctaggctggattcaaactcctgagttcaaacctcagcctcccaagtagccgggaaaacaggcctcttgtgctttaaagcagtgattctctgtctttaaaccttgtaactatgctgtgtggtggaaattttacttccccgtttaaagccaagatctctaaggccaagaattttttttttttttttttttgagatacagtctcgctctgtcacccaggctggagtgtagtggtgcgatcttggctcactgcaagctcggcctcccgggttcacaccattctcccgcttcagcctcccgagtagctgggactacaggtgcctgccacgatgcccggctaatttttttgtatttttagtagagtcagggtttcaccatgttagccaggatggtctcgatttcctgacctcatgatctgcccaccttggcggcaccccccgccccccgccccccgccccccacaaagtgctgggaatacaggccaccatgcgtggccgaaaaaaatttttttaattggcctgggctgggcgcaatggctcatgcctataatcccagcaccttgggaggccgaggcaggcggataacgaggtcaggagattaaggccatcctggctaacacggtgaaaccccatctgtactaaagatacaaaaattagccaggtgtggtggcatgcgcctgtaatcctagctacacaggaggctgaggcaggagaatcgcttgaacctaggaggcggaggttgcagtgagctgagattgtgccactgcactccagcctgggcaacagagcgaaacttcgtctcaaaaaaagaataaaataaattgtcctgggtcacataactggttaagtgatgaaatcagaatttggacctagataggccaggatatttctgctacactcatgtcaaaattacactttttattttctttataaatacacacaaattcatttcaacctgtgttcccttgtaaatgcatatacctttgatataggcatatattcatctattattttacactgtgcatttctgaatttttagaatttttacttgaagtgatcaggctggcgctgtggctcacgcctgtaatcccagcactttgggaggctgaggtgagcagatcacctgaggtcaggagttagagaccagcctggccaacatggtgaaaccccgtcttcactaaaaatacaaaaaaattagctaggcatggtggcgcgtgcccataatcccagctactcaggtggccaaggcaggggaattgcttggacctgggatgcggaggttgcagtgagctgagattgcgccactgcactccagcctggcgacaagagcgagactccgtctcaaaaaaaaaaaatagaaaaatgatcgggggtccacaaataagagtaatgatcaagggtcagcaaattggggccaaaaatagcctgttttcctgttttctacacaaaagttttattaggcacagcccatcccatttgtttaaaaattgtctatggatgttttcatgttttggaagtagagttgaggatcgcaaaagagattgtgttgcctgcaaaactgaaaacatttactatctggccttttcagtaaaccatttgctaacccctgattctcactataagacggtgactgtgaagttctttctatttcacatactgccatatcaagttgatttcttttgaggtagggtttgtttttttttggttagagatagactagtatagtgtttgagagaatttttatgaccttgggccagttaagtaacctgttttttatgtgtgtagtgtagatggtaatgttatcttgcatgtttcttgtaagaatgactttaggtaacttatgttaaacgcttaccatcatgcccagtaagtgttcaatttacaaactcaagctgtccagattcaaatctttgccttacaagctactaactgtgtaaatttgtataaatcaaataaccttgaatcctcattgcttctttttgtaaaatagggattaataagacctatccaatatttaactattttgtgaggattaaattaattaatttataggaaacactttgcataattcctggtatacagtaactgctcaattaaccttagttgctctcttagttatggttatatcatcattccgatcctccattgcatttgaaacattagcaaactaatgtttactactaatgaggaatgttaaaggtaaaccaataagttgacttttaattataaaaggcataaatgtaacctatccatatctattggtataataaagctgatatttagagagaacattatgttatgattaaaagaaacatttcttgcttaaattttttttgtgtgaatatacactgtatattgaaatatctgcacttaaattttaaatccagctgaaaattggataagatagtattagatgccactgcatttcaagatagagttttatttcttgcaggtattttaagccttgtgggagttcttctgttaagtgaacagatagagacactgatacagatggctctttcaccgtctcatgtgatgataaaagctaaaaggtttgatccgaatattgcttatattgggctaagtgattgaccttggcagaattaaattatttttcttcttctggtgacaattaatctgggagaagtaccatttgatttattgctatacatttcaccaatatccacaaggcacttgtaggtaccagacatggcattggttgctgggggcacagagataggaacaaagtggcttgctcaggttgcttctagccatatctgcattgtccttgagagggatgagtctctcaggcctgcctaggaaggaattttggcagcatggagaagagaaagtgctcagcccggaacaaaagttttcacctactatgttgcagagaagttggcgtatcagtaattataaaggaagaatagggatttactgggtgatagagcaccaaatagaatgaatgcaatacatacttgaagtaaatcagagtagcttgtattgatctcaaggggagaagaaacaaagcttagcttaattctcatgcctctgttgttacttgtttgtaatggacatgacacttacaaggtatcctataattcactaacgggatttttacttatgattaatatttaactctccacaaagcttggggtaaactgtgaacttaacttgctgtgaacccgaacatgaactcacatacttcagttggaggcctcagtagtagcatgctgtacaaaaatgaaactaaagctccagggagtatttgggaacagggcaaaagggtaatggctcctccttatagagcaagcctcaggcctttacctttgtgttttgaagatggagaggatgcacttctactctcgcccgggttgtagcatgcttgctaatgatgtcaagagaactagtgtcagcactgaccatagatgtgacaggtaacagcctgttattttgtgccccatgtcatggcagccattgattccgaggtgtttgatacacactttgatagaggcagagtgaagcaggacatggacaagcatctttccgtgtagtttaatggtctcaatctagaaagcccactcagataattaggttgcttaaaatgtgatgagactagggaatagagccatatagaagtgtgtgtgagagagaattcagtggtttagtatattcacaaagatacacatttgacaccagcctgggcaacatagtgagaacctggctttaccaattaaaaaaaaatagaatagcagaagtaatcagtgaaaggcattttaatacaattatatctagatttattaaaaataaaattttagtccaatttaattaaaggccagaaactagatttttaaagaatattagtctttctcatattttccccaaatcagttgctttaaaaaaaaaaaagtgtgcagatgcctcaggcacaataactgtactcaactcaagaatttgcaattaagaaaaaaaaaaatcaaacctcaaagaagaaatccagcaactcagaggttcaggttcatttaaacatgcatacatttacatgggcacactttttttgttttgttttgtttttaagatggagtttttgtttgtcgcccaggctggagtgcaatggcgcgatctcggctcactgcaacctctgcctcccgggttcaagtgagtctcctctctcagcctcctgagtagctgggattacaggcgcacacaaccgcgcctggctaactgttgtatttttagtagagacaggttttcaccatgttggccaggctggtcttgaactcctgacctcaggtgatccacctgccttggcctcctaaagtgctagcattacaggtgtgagccactgcaccagctgggtgcacctttttgtttgtttgttttgttttgttttgttttgttttgttttgttttgttgacatggagtctcagtcacccaggctgggattcagtggcacgatcttggctcactgcaacctccgtctcccaggttcaagcaattctcaattctcctgcctcagcttcccaagtagctgggactacaggtgtgtgcaaccacacctggctaatttttgtatttttggtagagatgggtttcaccacgttggccagactggtctcgaacttctgacctcaggtgattcacccaccttggcctcccaaagtgctgggttactggtttgagccaccacacccaaccgggcacacgtttttagccaagccataggtctgattaagtacagtcagattccttgagcaggttacaaagctgtggatttgaatggagatctttagttcccttgcagaacaatgagtttccaaaagcagagtggcttacagcctaaccagctgcttctctcagcctttaaccattttgccctcctgaaaattcatctttggtttccaaccacctcttccaatatgcctgactttttgtgattctgttagtagaagagtaaaaagtcaaggggaggcaagaatgaatgaatctcatataaaaatgatgctcaagagaatcccttaattttcaagacagcagcccaaattgtaaacattgagacttttacagtgttaaaaaaaaaaaagtgtttacaggccaggcatggtatctcacacctgttatcccagcactttgggaagctgaggcaggatgatcgcctgaccccaggagtttgcaagcagcctgggccccatagggagaccaaaaaaaaaaattgttgttttggctgtagtgtcacaggcttatagtcccagctactcaggaggctgaggtgggagggtcgctggagcccaggtgaggtcaagcctgcagtgagccgtgatcacaccaccacactccagccttggtgacagtgagaccctgtccaaaaaaaaaaaagattaaggcagaggaaatgttaaaggttacgctatatttagttgataataatggtaagactgttcaggtgttttaactatgagagtagggttgcctctttcttaaatttatatatgttcttattgggtataatttctagacagaatatgcaagtatcacagaatatggatggcaattttatgttgcttgcacgtgactttaggttcttatgtttcatgataggagcaaagaaaagtcttgcttgccaattcttatgattgcatctgttctggaaatttactagcatttgttacccaggatttctgaagtgctggtgactgctgcccagtagtcttggtgggcaaagttactaaaatgcatcacgaatccttctggtgtttgcttgggctatggcagggtttctggaccttagtactattgatgttttgggccagataattgttgcggatgattgtcctgtgcattgtaggatgtttagctgcatcactagcctctactcgatgccagcagcacccccaagtgatgacaatcaaaaatgtcccctgggaggagtaggggatagactctctctggttgcaaaacactgggctatggtgttgagatctgcagtgatgagcagctttagatatgtgaacagaagcccaggcgtggtggctcacacttgtaaccccagcactttgggaggctgaggtgggcggattacttgagatcaggagtttgaggccaacctggccaacatggtgaaaccccgtctctactaaaaatataaaaattagccgggcatgatgatgggtgcctataatcccagctacttgggaggctgaggcaaagaaatcacttgaacctgggaggttgaggttgcagtgagctgagatcgtgccattgcactccagtctcggcagacagactgagatgccgtctcaaaaataaataaataaaaataaaaaagtgaacagagaaatacccgtgcaatactgtgtctcatcccccaaagacggagtcttgctgtcgcccaggctggagtgcagtgacacgatctcagttcactgcaatctctgcctccatggttcaagcgattcacctgcctctgtctccgagtacctgggattacaggtgtgcctcaccaagaccagctaagttttgtgtgttttttttgttttgttgttttttgcttttttttttttttttttttttgagacgaagtctcactctgtcacccaggctggaaggcagtggcacagtcttggctcactgcaacctctgctgcccaggttcaagcgattctcttgcctcagcctcccaagtagctgggattacaggcacctgccactgcgcccggctaatatattttttttttttgtagttttagtagagacagggtttcaccatgttagccaggctgatcttgaactgctgacctcaagtgatccatccatctcggcctcccaaagtgctgggtttacaggcatgagccaccaagcccggctggtctcattttaatgtaagctctaacttctgtatcactgctttgcacattgtagataaccagtgaacattttttattgtataagaaaaagtaaaataaacaaaaatatgccaaagcaaatatgataaatacacatttagtaaggtaaaagcaagtatttgataaaatgtgtaatgtagtctagtagctttatttagaaacagaaaacaacataaaatgttgacttgaaacattgcgtatgcatatttgccatgtagacagtgagatatggaggtaaactgctttcctagttttgttttgtttttttttttttttgttcaaaaggaattcactctccccttgtccactgttataaaatagcaaatggtgattagcatctgtgctgtaaccagagacactgctgttcccagctggaatctgtaggttctttgcctgctagagattgtgacaagaagccagttaacatggagaggtgtacatgtcagtcttccccagaaaaggacatgaaacagtaggaccatccttccaacccatgacctacatctagaggcattctttttttctttttttttttttaaaccggaacagaaatatcatctaattctttctttacagagaagtggtataaggaagtacattctggccaggcacgatggctcatgctgtaatcccagcactttgggaggccgaggtgggtgcatcacctgaggtcaggagtttgagaccagcctggccaacatggtgaaacccctcgctactaaaaatacaaaaattagccgggcgtggtggcacacacctgtggtcccagctactcgggaggctgaagcaggagaatcgcttgaacccgggagacggaggttgcagtaagccgagttcactccattgtactctagcctgggtgacagagcgagattcgtctcaaaaaaaaaaaaagaaaagaaaagaaaaaggaagtatattctaagcccttgaattgatcttggctttcttcattatttttacaagtaaaaataaaaactttgatatttctgatgttctgggatattataggaatgataccacttgaattcagctttctaagaagtctggtatttcaatagtcttaatatgagtaagaaaattatgatcttggtactggatctaaggcagaggtatcgaagctgttttaatgttgcttgagataggacagaacttcagagtaaaataaatgtgtatagacaatctgttcaatctgttcaaattaagttgttgagctgtatatttgaatcttaagactactaattttgttgtatctgtcttttcccaaatatatgtgtacttcttttaataagccaaaacctatgcaacttttactaattcttccctaactacttcttttggaaaatgattaaatcttatgtctcacgttttgacatatctattgcatttaaaagataaggttgatcatgctgcttctcaaactgagatatccattcgagttatccaaggcccttggaaaacaatcgttgttgagtctgtatggggggcctgagtcccaggtggtgttgactctgctggtccatgatcctattttgagtagtagactctagtagcgtctcctgccttccatatggtgcagatttgcagcattgagacaggaagtaagaaactgaaaaggaaaaccattcttacctttggtgttattgttcttggtatattacagataccaacaagtatgaggcaatcctgagacatctacctactgagcttttctttccttaaattcacacctcaagaccaaggaaaccgaaaaactcttacagtctccctacatgtgttcacttgtgcccctatttcctgtcattaacatggtagtgtagccaactcctgctagcctgtaaaagctaattattacagtatagaggaattttgtaagccatagccattagtagcttgaaataccaatggtgggagtatttataccatggcagttggcatacactgtaactcaagagtgttctatttgtttgtttttctagacagtgccagtttcccagcatactcctgtctctcattcagtaagaaaaagcacttccccttattttccaatacaggacatgatatcccgagttttgagcttcttgttaatagcctgttgcacgctaaccacgcagctcagtgaagagcaagtttattcccataacaaacaggaaacaaaggttgaggaaaaaccacagtggtacccttttgtgagtgttccctaacaccgtcacgggagtcctgattagtctaaatactttacaagtaaatctccttcaggtggcattttataaacaatctttcatcatggagagatgagaattgggtcaggtataattagaatgacagatgtattggctagcctgagagaattaacgcaattcagtaaaaaggctagccaactgcggatatcttctagttacttccgtgacaaattagcaccatcctcttgtactgaagcagtgctttcattagcatgcacagctgtttgcatcatctttgtttgtatttcaatccatatttggagcttaagtgagatttgtcataagacttcagttcaagcttgcttgcctaattttacatgcttctatttagtaaaatatgattactaggtcataaatatttgataatttattgccttattagagtaattttctaaacatgttttttgacgactgcttgccactacgtacaagcacttgaaaaatgttcttttctattaaaagtacatggttccagaattgggaaaatcacgttcttaaaaaataaccagttttctattgtgttggcttttaaaattttttcatcagtagaatcaaatgcaaatattgtctgcttatttttcaacagaatacaagtttgattttaataacttaggctcatgaaatgtcaccacgtagtaatacttagaattacagcaataacttaggctaaaaaaataaagttgttatgaactacattgagctcagacagatatatgtattatgtaaacatttatataaaatgtatataaattgtatattgtattatataattatatattgtaatatatagtatataatatataatttataaatataatacataaattatatttataaattataaagtttttatataatatattataatctaatatattataattatatttataaattataacgtttatttgaaatattgaagttttgtatacttagtggattttaatatttatgtcgttttcattttattccactgttacattaaggaagtaacttattacaaaaataaattatatttgtcttacatttgccctttttactctacttaaaattggagaaaaagagttcaagatagggaatttctgtcagaaaggagaaatagttgtattatgtgaagtttaagtagatattcttgtagagtatggagaaaataatgctataaaatgttgccttttaaaaaaaagttcagaaaatatagttcctagctctctctaaatgactagtttgattgtgactgctttcccaaaatttgtaaatttaaaatttatacatcacatggaatatagttttatttcacatacattccagtaggctgagaatacttgaaattcaatgattaaaaatgaaataataataaccagctttgctttattctaaaaccagctttattctttatttaccactttatttacagcgaattatttgctaatctgttaactttgcttcataagaaggcattataattatcgtacatttgaaagtggagattttctccccattctggttgccagtttcacaactgtgttcattctaaatttattaaaatatgtaaaatcagctttctaaccttggttgtccacaaagaatttcactccaatttgaaatatctattcagaactaattttttgtggttgagcattattttttgaacaatgaattgcataatcattttgtataatccagggagctctggcttagattctgtattattttgtgttatactgatttttagaaaatggaatgtagcgttgacacgagcacaaatctcagcaagggcctaccttacaaagataaaatgcgtggagttttattagaagcacatgattttgctttgtgtttcgtatacaccagcatttcagtgtagtaaatggcattttgtcttgaagagtgagcagagttgttacaaaagaaggcataatgcttccttgccagcagaattcagataagtgaatatcagaaaagctatttgtgatcttgaaagtgtaagaaattcaacatcaataaaggattgtggttccttagatagccatgtaagtctttgcctatgtttctaacatttctctttaggaaatattcttgcttttatttttctgaacaaattttctccattattatctctgatatttactttgaacagaaaggtggattggaaatcaaaaaataagtttgatttcaaaaatgatttcaaaatgttagttttctcagtattttacattttgagaagagaacaaagaaggcagatgaagagttttttgttttttcttaaatttgttttcttttcaactttatttttaattgacataataattacatatagtatacattttgaagatacggttttaattttcacaggaatcttatttgggtttagttatataaggtctaattttgcatcctctacatttagtggctgatttataaatttccactgagtgataatagtaattaatgtgaaacaggttttttgctgatgtttttagaagtttcagtagattaggaaggaagaaattatgctattgagaaaaatagaaaatgtaaacataagcatttgaactctctcttgagatatttttatcttccatgaaactagatgcggcttattgaagatgtgtttcaggtctcagtgctctaaaactcttctacttggtgagcatcttgattggttagatctcttactaatatcccattgctagagagggatgtaaaggaaattttctcaaactgagatttccaaatcttccaatctctgagtcaagtaaagagacaaggttagaactcttaggcaaactgaaaaatcaatattcctatattatcattatttttttctttttttgacaccaagtctcactctgtcgcccaggctggagtgcagtggcactattttggctcactgcaatgtacgcttcccaggttcaagtgattccagtgcttcggcctcgcgagtaggtgagattatatgtgcacgccaccatgcccagctaatttttgtatttttagtagagacagggtttcgccatgttgactacgttggtcttgaactcctgacctcaggtgatctgcccacctcggcctcccaaagtgctgggattacaggcttgagccaccatgcctggcttcctatattcatttttttatgtgggctttttaaaatcttttcaatagcaaagacttgacaccaacccaaatgtccatcaatgatagactggattaagaaaatgtggcacatatacaccatgaaatactatgcagccataaaaaaggatgagttcacgtcctttgtagggacatggatgaagctggaaaccatcattctcagcagactatcacaaggacagaaaaccaaactctgcatgttctcactcataggtggaaattgaacaatgagaacacttggacacagggcggggaacatcacacaccagggcctgttgggggggtggggggttgggggagggaaagcatcaggagaaatacctaatgtaaatgacgagtttatgggtgcagcaaacaacatggcacatgtatacctatgtaacaaacctgcacgttgtgcacatgtaccctagaacttaaagtataataaaaaagaaaaaaaattaaaaatcttttctttgagacaattgtagatttacatgcagttgaaagaattaatagaggccgggcgcggtgcctcacgcctgtaatcccagcactttgggaggccaaggcaggcggatcatgaggtcaggagatcgagaccatcctggctaacacagagaaaccccgtgtctactaaaaaatcgaaaaaaattagccggtgtgtggcgggtgcttgtaatcccagctactcaggaggctgaggcaggagaatggcgtgaacctgggaggcggagcttggcgaagcctgcagtgagtggagatagtgccactgcattccagcctgggcaacagagcgagactctgtctcaaaaaaaaaaaaaaaaaaaaaaaaagaattaatacaaagagaccctgcatagtcttcactcagtacagtatcacaactattaaattgacattaatcccttaacactgctttaacccaagtctatgctgctgcttctccgtgttcacttctgagaggcactggccatttcttgtgtgcttattcatactttgtgtaaaagcattagcatcatacatcgctggtgctgaccctaccctcagtcccagcttctcccagagtaggctaagattctcttttctactacatggaaaattgttctggaataataaagggttagcaaaaaagtcagagaaaacaaacagttgcattccctttccctgtagtagagtaggaatataattatgagtgatagaggatacgttccattcctttcccagtcctctccgaagtcagcttcactgctgtaggaagttgctgttctcattatttccctgagggaaagtgttgggaagtgagagttgaggtgatggggaatcagggttgctgacaattgggggaattataacgagaagctctttttcaccaggagaggggttgcatgttaagagaaggcctatctgctcatcctccatgtcagcagatgagaaccagttggacaaggtagctgtctcttagagattgagaagtaacaaaagcacactgtcagtcctgttcttccagcctcacgtacatcttctccatacattatgtatttgacattaaattaacatacactgttacacccattcctgaccgcattatctcaggtagccttttgtatttgagtattgtgggatctgttgctattgcccatgatgcccacttggactccaccaaggcagtgaaactcttgggggccgttcaaagtcaagagtgccaactgcccctaacaggattgggagaaccaaccaacactccccgaatagggactaactcactcttttcttggcctttatgaaaggaaggagttaaggctcttacagctggagactccagcaagagttgtaggctcaacgtgtagcttatactatttacttaattaacatgtaaatggattttgagttctgaatgcttgttctagttgattagggctcatttagcctggcttctacgaattagctataacaaatggtttcatagctgttatagaatgaggcagaagaaaataaaatgaatgtagcattatgtttaattagtggtataggaaaatgttaatataatgccatttagattctggactggggagattgtgcctttatcataagtaagaaattgttgctaggtttcacataagggcacatagttatcatgaatcatctccttcgatcatcattcttttatcccattacttgacttgcacccatccaaaattctaccacttttatttaatatatagactcataaagacaaggtttgtgcatctgcagagctgtgatgttcactgcgaggcccgtggcacacatctataagaagacacatatttggtactctaagatgatacttttttttaatgccaaaatgtgagggtcagcataaattgccaaggcatggtaaattttgttgccaatgctcccgtgactatggggtgaagggattctgtgcctcccttggtagcaatgaccacggtgcttgcaatcccagtgccaattcccggcacagtgcaggctctggaggcactgctgccttgcagtcttattggaattaacactgcctgagtaagagattaataatgggtattgttgtgtcttagaaacgttaaagagcatgtgacatgaatatgtacacattggtgaaggagatacagagaaggaaagcaaagtgaagctgtagatgtttgttacaactgaaggtaagctctgggagcagagaccactgctggctatagttgatgggatccacaatgtcaatacaaatggggactaactattgttttacttccctatacacgttgctctttcagtagatgcaataaagtactggtaaaaccagaggtggctaccatcacgatgatgtcaacaggagggacagtcagcactaagcccagaaggtgtcaaacactccgcaggagaaatgcgccatgcaacggacatgaagatgatctgacactcttcacgtggttttcagatggaaacgtggctacgaaagcatcaacctcattatcatccatcattaaggccatctcactcagtactgctgctttcaaagtccacgctcccaaagcaaattggatttctgtacacaatactcttacaggatgaaacccaaccaacttgttgacgtaagtatcccatctacttcgcaattttatttatcttccaaaattaaaggactggcaccctgatttattaaaagtgaattgggtctagggaccatatcccctctgagttactgacagagcagcttctggcctgtgaagctcaaagccatgcctagatgtgatggatccttgtctttgattggctaattagaatcaatctgttgaaggaccagtggcagtggctcacgcctgtaatcccagcacttagagaggctgaggcaggtgtatcacttgaggccaggagttcaagaccagcctggcctacctggtgaaaccccatctctactaaaaataccaaaaaattagccaggcgtgctggtacaagggtaatcccagctacttgggaggctgaggcgcaagaatcacttgaactcaggaggtagaggttgcagtgagccaagattgtgccactgggcggcagtgcaagaccctgtctcataaaaagaaaaaaagaatctgttgaatattcctaacttggaagtaatgggtgatgcgtggctttcatcttttagaaaggtgttttttcctctgtcagtaaaactaagaagacatctgtgtgtgctaaggcgtcagtctagcaagggcagggcacaaacccagagagagaattgggctgttgtttcacttccaataaaaatgggatatacatgggaggtagagttataattctactcaggattgactttatacatgcaattggatgggtcactgattgactttgaggcaatcagggatgagtgaaactgatcttggggagggtggcaagacatgttgacaggtaagatgtgttttaatgtataacagtgcgtggtgtgtattaatcagttggagttgattgactgcgttttattgtttggaacattcctgcccaagggtcaggtaaatatacaaaatatacaaataatacagatttttaatacataaatatcaattaagtagcataattaaataatacattgttatagttgtacttaatgtgtatgtaaatatatacaaataatacagatttttaatatataaatatcaattaaatagcagaattaataatacgttgttatagatgtacttcatgcatatgtaattaaattattaatgtataatatataaatacatattttaatatacaaataaaatggtcttaaatcagagttaatttaagaccatttatattagtacatatcttaatatacaaatgaatggtcttaagttaatgtcattgagtataagtcacatttacagatatgacatgtgtttccagataaagtcaatggacagacagcttccaacactggaaaacattcaaaatatatgcaattaattttatatttgagttaaggcaatcatttattaaggaaagcaatcagatgtttgtgagggcttaaactttcgcttcataaccaaagcagtttccttacatgaaagttgacttcttaaaaagagaagtttattttttataatggagaattgttgtgatgtgcagataccttccgtcatttcatactcatctaaaagcagccaaatgatcttttcacctttggccggaatccttttattgctaccgagtcctgcactcattaaaccagatgacagtgcatgctctgagaggtgtaaatctctagtcctggtggccagttaaattcctcagtaaatgtttggtagatgctgcctaataaaccagtccaggttgccactgggaggattaaaagaagtaaacgtgtatacatgaacagagagacagtgccttttcatgctaaatgtggttccccacatctcctctgattagaggtgtgctctgaacaagccgagacggggccgtgccgagcaatgatctcccgctggtactttgatgtgactgaagggaagtgtgccccattcttttacggcggatgtggcggcaaccggaacaactttgacacagaagagtactgcatggccgtgtgtggcagcgccagtaagtggacccttcttcgagcctggccacctttcgtctctctcgccactgactctgctttttgtaacagattgattttcctggttcttgggaatgggcctgttgctaccactaaccacatttctgtccacttctctaattgctcagagtctccgcagtatgttcaatcatgagcacacctctccgtctttccctgataaagcatggccatggatgtgttctcttcctagctgtagcacatatgtcttgcaatccagagggacttttgagtgcttctcttttaaacaaagctggagtggctgttttgtcttctgcagccagccgtttctgcaaatgcatacttatgtgtttgtccgtgtacatatgtgttcatgtttatgcatgtgcactacctgtgcagatactgtctaccactggaagcctggctgatgcagcttgagttgcattgataaggtgtatggctgtgatgaatacctttaagttggttcataacatgtcttttattgtgctgatgagggaatgtgattgaattgagctcatgcatctcaaatgccggagggtagaagtgcccgtcttgccccctccgagctcagcacacagacatttgccaggtcaaacttctgcttcttctcttgaaagtagaagaaaacttttgacttaacgtgagaaactttcaatgacataaggctcgaggaacataattttattttttttgtttttttaaagacagggtctcattctgtctcacaggctggagtgcaatggcgtgatcttggctcactgcaacctccgcctcccgggttcaagtgattctcctgcctcagcctccccagcagctaggatcacaggcacatgccactgcgcccggctaattttttgtatttttggtagagacaaggcttcaccatgttgaccaggctggtctcgaactcctgacctcaagtgatccacctgccttggccatccaaagtgctgggattacaggcgtgagccactgcaccccgccagaacataattttcaaagtctttctcttgaacattaagcttttcataattccgggggataaaaatatgaagtcatgatgacttaagtgcatgatgaaattttccccaaagaggtaattctcaggaggtccagtaccagatgtgagacttccatgtcgttaacagacttccaagtgaaattcccaattgtgcttatttatttatttatttatttatttgttgttgttgttcatgagtaggaagtatgaactactcaagaagtaattattcagctcagcttgataactaaaaatgaaactcaataactgtgtattacttttttgagagactcctgcctaattctccgctgtgttgcaagggtggcagccacatttcctgcctgagattcctagggattatataaattgttttgcagcaagatcttaggattaagcaaaacaacagaagggcctgcaccattaatacccccactgtaaaggagcccaggatctaagaggaatgtaatggaaaagctcctgttggtctcctgccatcgccagtgaatgagatgactgcttcagtcccatgtgtgaacaggtgtaggaactgataacctcaagggctttttttttttttttttctggctctgattggatgattgcagcttctggctcaaaggactcccttcttcagtttcaaacaaagcagtcaattaggtcaggtattgcgaacacaatggagaattctgttgcctgcagcctttggaacaaaggccttttgttacagtgattctcactggtttagccggtgggagaggtttcctggcagatttgcaacttttttctccctttccctgggtggattcattttctgaaatatcatgtatagtttttggtaataagagatttatttggttttaattattagcagtgatgaatttgcttcaagagattaaaattctctccacctcaccccagtactgccatcccttcacctaacactctctccctttgatcagtttgggctgggagtgaccagtgggcacctgtccaggtgtcctgggtggcacacagtttgctgagggttttgcaaaaggtcgatgctcccaacagagatgtattagatgaggctagctatgcctgattttagaggggaaaggtgacagaataatgtatgaagaaggcaaaggctgaagatcagttagatgggtggacaagaataagtagagagtataagcctcagcaaacagccagagccgagagccacatgctgtcctatgaatgagtgaaataaatggagtttttgtgaaaaaatgcatcgaagggaattggggatatttggcacaaaaggagcaagaaatcctcttctgttaagaaacctgttgttactcggatatactatcagagacaaaatatccagcattctcaaatgttaacttcttacgaaaatagatcttatgtttatatgttcattttggttttgttggagggaccaaacctaagtgagtgattttgtttgttaggttgtttttttgtcagtggactcgtgcatttcagccatcattcccatgtttctctttttgtttttagttatgttctcttattttttccatagtgtcccaaagtttactcaagactacccaggaacctcttgcccgagatcctgttaaacgtacgttgtcattcacctgagggaagggaagaggggaggaggatgctgcttggttcacataactccagcatcatcaccttctttgcatggttttgtgtttcttgaacacctgtcttagtaaaatgtttcttcccattaccttgcttgtaattacatctgattttgccagacagcttgagatgttgggctaagaacatcattgactaagtttcttctatttctgaccaatttcctttttatttagtctggttttattgaatattatatggacaacatcattgtattgtatttgccattactattttatttcctaaaagctatcagtgtaactgagagcaggcttagcctctcactgcttttgcagaactgaagaacaagggctaggtgcagtggaaggaaagtgactttacttagcaaagctagcaatggggaaatggtccaggctcctgcctcaaagcaaccatctcaaattttggattaaaaaacaaaggcttaaaaaggggagcttggaatgcagggcatgaaggaggggtgaggaggtgctgctatacaggacttgttccaaagacttgagttattatccagttcggtaagtgggctggcgcatcccgcacaatcgggttgtaaattaactgcagccttgaggtgatctcctgatgagggagaattctgaaggtgcctaagtcagtcagtggaacttctaagcaagcattaataattttaataataattataagcgtaattagataatggaagcgctgtgcagggagtgcctggtgggaagaaagagagcaaaggttaccatttcattactaaaactggaaggaaaagaaaggaagaaagatctttaaaatagagtactcggttacatcaagatgccatgatttaacaagagactataatacataagtaacttgtttcctcagaaaaagtacttaatattcatggtattgtagtacatggactaattcgtacacgcagatttcaatttatgtgtgttataagacccggtttcaactttagacatgaagggtcacttttagacattaggaacccctctttctcctctcccagaaggcataatggtaggttagaggtgctcaccttttgactaggaagtagagaaagagcctcctataaagaaatgcattgtccagccactgcaggccttacttacagtgtcttatgttttgtttttatttcagttgtaatatcagacgagtttagttttaaaatgtggttttagtactcatatttgaatttggattccatccagaaatagatttatccagtgttaggttagggatgatatatgccatttatgcttatgattgctggaagaagaggcacaatttcagttgtaacttagatattttataattagcatttgtgtacattatcctgaaaaaaaaaaaccctcatctcaaaactgatgaagccagttatcttttttaaagatgataaattatagatgaaggattaggtattttaaaaaagactgcatcctaaactataaagttttttaatggcctccataaaatattcagaataattcacattatgtataacttttgaaggatgtggtttgtactgctgcaacataaacgtttcttttgctgttgtgaaaaaagcatttttctctaaaaacactgtaagtacagcaagtgggttgacagactaggaaaaagctctagctattccactatagtgttgacataggtacgcatgttgagttgcattgtaccgagcattttcacagatcatttaatttttcttcagaacactttgtgggcattttcctcattccttttgtacatacgagaaaaaatgaggcttcaagagcttagtgacttgtcccaagccatcgaacatggcaggaccaggctttgaaacccaaaatgacgttttggccgcactccacaccaaatggctaagcattggttctgacattgttttgccggttagtgaaatcacatttgcgattcagaagcacattttaagaatacagaaaacagtgaaaagaggatgaagaatgttaacattttttcctaaatgccatgaatagagcacgcatcagtaaattaaatgtctttcccattcttttataaaacagtgattatttttctcttgtttcattttagcatttataagaattctatttttccatttttaataactgatggaaacaagcatcattgtctgataaatttattttcatgctgtacacgtaactaccactttcatcatccactgttccaaacagatactgaaagtctcttttgtaattttctccttcccagtaattttctccatctacttgcagtgtatttgggatcctgacacctttccattctaggaggatgaagtgctttgggcagctatattttcttgtctgcctacagagactattcaatcacagcaagtgaagggttttgcagtgctagtacaaacagacaaggaaaaaaacatataatttctagttatttatagcctgtgcagctatgtggtcttatttatagcaaactgcacatttgatttgaaaaagtcatggtcatctggaggtcaaattcagatggcagactcaattcagagaaaaggagctgaactagaaggtaagcaagcctgttagactgggcaacttggacttgactttgctccttcaacaatctagagccagttggatgatatttctgcacaaaggtggttggttttacaggttgctcagtctaagctgcttctagtcaaataacaaatgtgaaaggagatagaaaaagctcttcagttgaactgataaaagattacacttagggagaaaatgtatgatggtttgcattataaaaacaataatttgccataaatcaggcatttctaggtttcaaacttttgtcataaaaaccaattttgagcattgcaattttagggacatattttattgttgttattttaaataaaaatctaaaccacaaatataaggctgagagctttcattttattcgtgaacataggaattcaaatcattaaaaaaaaaccctttctcatttgggataaagaatcttacgagagctgagttaatttctgacattagttttgcacctgcccatttgggtttaggacagtgcaaaaggtttcacatttaatcttcaaaatatagtatttgtagacaataaaattatataaatatttgtggattcatttatattttaaatatgagagtgtgaccattttttctggtgctgtctccatcagactgcatcccaaaaggcaaacagaccaactccttaatggcatttaatctctcaaagagcatcatgccaatttttagtcagcagattgcaccatgtgatctggccaaagtgtgtcccatctcaggctccttcatttgcgctgacatgtggtacaaacaactaaaccaaggtttctcaacctcagcactattaacattttgattcaaataattaatttttaggagtctgtcctaggcatatgggtgtttagcagtacccctgacccctacccactaaatgccattaacacaactccagctgtgataactaaaaatgtctctagacattgctaaatgtgcccagggggtcacattctggttgagaatcctgttctagagtagtagtttccccacatctgactcagagatagaactctcctggtgtaaacacgtgtactttccacaaatttgggggcatgttgaaatgttagaatgtcagcatcatccaattctcgacagatgtttgaaattgaatttgttagactattgtccaagctctcaatatttgcaaggtaaagtggaagttgctgttgctgtcctgactatagtattgaaggtctcgtagttttcctgctctaatgtaagctactgtggcagcagaagagaaaccagcaaatcccttagtttgaagtcattggttcacctatgcaccacccctttctcctctctgtttcatcttagtttcctagaatcccaggatatgctggaggacaaccatctgtagagatgtcctatagtcttgctacacaggttatttgtactttaggattatgtttgatggccttatagtttgtgcagaggtgtaggcctgaccccatgcaggattgagggagggaaaaagattgatttctaggcacatcagaatggtccagatgacatgaaacagactggtacacttacagagaatatgaaaagaattggaacttaacaagtcaggccccaagttccatccccaggttccaagtttgttgccgcagaagctcataattttcaaatcgtagaaaactcacaccacgcagcctttcaatggaatatgccaccttaaccccagggtcgttgtaaagacaggagccataagacagaagtctgaatgcctaggccatttaatctttggccaaatttgaactattgttcttaatcacactattcttgttcttttcactgtgcagtagcaaatgttagttcccattagcacattctgcaataccattggaactaaaactgccaaattagattaggcaacctgggattacactttgctccccaaccaacctagggagggagaacaattttaaagcattaaaagatgtgatggtgaattaaactacctgtcacgtcagtgccagtatattctatcagattaacaagtgtgaaaagctaaatctttggtatctggaaatgcttagataggaagaatggctttttcttcaaagccataataattagagatgaccctaaaattgaaaggaactggattgcttagcaactcagcattttttaaaaagaagggccatctactttgaatacaggttaaatatctcttctctaaaatgggaccagaagtgcttcagattttggatttcggaatattgatgtattcatgatgaaataacatgaaattcatttatgtttcatgtacaccttatacaaaagtctgaagataattttatacaatttttttttttttttgagatggagtctcgctctgttgcccaggctggagtgcagtggcgtgatctcggctcactgcaacctctgcctcctgggttcaagagatccccctgtctcagcctcccaagtagctggaatgaatgacaggcgcctgccaccacacacagctaatttttgtgttttttagtagagatagggtttcaccatgttggccaggctggtcttgaactcctgacctgaagtgatccaccagcttcggcctcccgaagtacttcgattacacgtgtgagccaccacgcttggcctatacagtatttttgataattttgttcatgaaacaaagtttctgtacgttgcactgtgagagaacaaaggtgttgctatcccagccaccatgatgtcatgtcagtgctcaaaaattatcagattttggagcatttcagattctcagattagagatgttctacctgtggtaaaagaatgttcattatgtctctgctctgttgtttagctatttgccaaaagagggtaagtggatcgtttaataaagtggtcagcaaatatttttcatacaaggccagattatagatattttaggctttgtagatcatgcagtttgtcataactacttaactatgcagtggtagcatgaaagcaacaatagacaataagtaaacaaatagacaaggctgtgttccgataatactacttttataaaagtagccagcagctgggtgcagtggctcacgcctgtaatcccagcactttgggaggccgaggcgggcagatcacctgaggtcaggaattcgagaccagcctggccaacatggcgaaaccccatctctgctaaaaacacaaaaactagctgggcgtggtgatgggcgcctgtaatcccacctactcaggaggctgaggcaggagaatcacttgaacccgggaggcagaggttgcagtgagctgagatcacaccatcgcactccagcctgggggacaagagcgagacttcatctcaagggggaaaaaaaaggtagccagcaagctgatccttggtttaatacagcaggtttttttatttttatttttattttttttccaatagctttggggatacaagtggttttagttacggggatgaagtgtatagtggtgatgtctgagagtttagtgtccccatttcactgagtagtgtacattgtacccaatacgtagttttttatccctctcctccttcccactcttcctcattctgagtctccaatgtccattatgccactctatgcctttgcataatcatagcttagctcccaatttataagggaatacatactgtatttccattcctgattacttcacttagaataatggcctccacctccatccaagttgctgcaaaagacttttattttgtggtttttctggcctactagtattccgtggtatatatacaccacattttctttatccctcattggttgatgggcacttaggttggttccgtatctttgcagttgtgaactgtgcagcagttatttttgaccccaggatgtgcgaggccaggtattttgagagacaccagcaaaggaatctgagtactggctatcaatacctgataattttattaatgagttgagacccagatatgccgtagaggtaaataaccatataaaggaaatatagaagtgtaggagaagattgctctggaaggctggggtaaaatgaaatcagctttatccttaagacctccatagaggttaactgtaccatctccttttactgctacagtttatatgaaactggacaatattgaagattttgacttttcgaactcatctattgagtgttgagcagctatgacaggttatttctttatgtgcctccattaacgaagtcaagaatagcttctgacaaattgacaaaaaacaataacctaaggttaacccattctggacgccagttattgctattgcttcacatatattttttagattcaaacttgaggttgcttttaagttttagtgtgatgtgctgaatagagaatagatgttaataaaaaaataatgccagcattcgttccttcacattcagttcatatatttgaaaaaattcccatgtcagtatgtgtccatggacataaaaaagaaatgtagcttgactagagtaaacacatcatagattatatttttattaccttatgtccatgtgatgcattgatagtgttctccaccaactatgattgcactgactataaaattgtaatacaagggcatattagggggagaatgcctttgttttttcttttgttgttattttgtttttaagagagtctggtattacactggaggatcacaaactgtattttcttgttataaatggctcctctatcttggacttaatggttaggataaatatttgaatgtagaatgcgttaggagttttaactatttttgaaattaggaaaatggagagacactttttttttttttagagacactttttttttaagttataataagcatggcactcggaaagctctgccatgtttcaagattaaagtttcacatgaacgctaacaagtttatatttcactcatatataaatgatcctccttgtctcctttcctaaattatagccatctcaaatgacaacattgctgggtcggtatcaaatagcattttcaatgataaggcaatgatttatataggtcttaatttgttttaatcttctgttaccaaggctgtagagataaattgcttttctgctgatgaaaggagactaacccaattttcttgttagaatctaatattaatatatcgactgaatgccattcataagccttggtttagggaaacattcagccttctggcctgttggagatggccacggtcattgctgtttgaaggtgggtcatttcttcttttgtgtcctgagtccattgtgactgtaaaattatgggtcaccccagagcctgaggaaacaaatgcatatcaaaatgataggggcaatctttcacagtgcctttaattttgaccccacattcttatatgaatgtgaagtaccacattagtatgaatatgaaatggagtgctccgcaatgattacaaaatcagaactaaaatgagggaaatcagtgcatgtacagttcaacttaatggattatcctctaaggagtcttcagacaggctaggagagtgacgtctgcctcatcctgaagatattagcaggttttcccctgttttaaagtaacttcccttcaaatgctaacagttttctcagaggaaacacaggtatggaaaatgtttcgttggtgtcttggccccagtgatggaggagcattttgtgataggaacgttgggtgcagcatcgccatttatgaataaactgaaagctaacctgtgttacttcaccccagaaaacagagctctggcaggtattgagaatagatcacagtgtgaagtggcagtattgtgacaagcatgcgtgtatcagtattaaaattgaaatgagccctcacgcacatgtgaaagcagtttctcccgttttcatattcagttccctgaggtaatacagcattttggtgtgagagaaagaagggaatctgacccttctcgtgtgggaagggggctgagggcaacaacctcctgtgacagccaccctggtccaagccaccttcatctttgtctcctttttttttttttttttttttgagacagagtttcgctgttatcacccaggctggggtgcaatggcacaatcttggctcaccacaacttccgcctcccgggttcaagcaattctcctgcctcagcctcccgagtagctgggattacaggcgcctgccaccacgcccagctaattttagtatttttagtagagacagagtttctccatgttggtcaggctggtctcaaactcctgacctcaggtgatctgcccgcctcagactcccaaagtgctgggattacaggcgtgagccactgcacccagcctgtcttttcctcttaaaagatcttccttctacttttgtcccatagcagccagagtgatccttcaacaaaacgccccatcacatatactccccctcaaacagcccacgctggtccctcagaatccttactgtggctttaaggctgtacatgatgtcccccatttcttccctgcctctcccactacttcctctcttgcttctttagctctggccatgcgggtctcgtggaatttgccagccagcttcaactcttagggcttccgtgctagttttgtcatctgcctgccatgtccttccagcagccagctgggaagatctgaatgtcacctcctcacttaagactctgcctggtcgctcacttactgcggtctacctttcccctctcccctcagctctcccgatccttctgaactctgctctgtttttctttttcctctttttctccataatacaaatcacatattaacaatatgacttactggcttttaaaaaattcttgtggtaattgtttctttccctagaatataattccaccaggatcagggccttcatgtttttctcattggtttctcccatgtgcctcacatataataagggctgcaatgttggtgggctggaggaataaaagaatgaacaggcgcactaaaggcaggatagtttgtccatgtcagagctgctgtctcagctgctttgatacctctgacttcccagggtggcaaagaataaggatgtggcttatgtagaaggcgttagtcatccaaaatgccactgtatatttggaagcaaatattcaccttgaagcagtgatgtactaggaattagaactgcttttctgttacattttttcatttgttatgagtgtttagatacacatgatcactattaaaaggaagggaggtaatagcctatatatcctaccatgcccctcaaggctctgttaggagactaaaatacaaaggtcatttaaaaagttaaaagcttatgcatgtgatgttggtattgctgctaatgactaggcatctagaggtcaaaacctagagctaaggatattgaaccctgtgttttgtctcgttttaagtctaggtttttgtggaggggggaacatacctagccagcttgcttgcagaaggcatgagtgagcaggctgaaggagggacccaaggccagaacgtcctccatattctagctccatgggctctttcacttgatccctgctttatgacccaacttctgttgaaggatttgccagatagtgtttggggcaggaacagctgtttcatagaaaacaagccaacggacatcataacaaagcatatggttgttttgccaagttgtgctgctcattaacaaaacaaaacaacaaaaaccctttacagtgccccagcatgtggatggattggccctttactactctaaaaattagctttacagcctttttatggcttacccaatcttaacagactttatttgtgtgtgtttagggatgcaaatgggtatgttaaatgatagtgttttgcctctacgcaataaaatagggtaattttttcttcccatgtattaaacgagaacacagaacatgcctagcatggtgggctctgatgaaaagaggctgttatcatttggccaacatggaaatcctagcctttatttatttatttatttgagacggagtgccaacatggaaatcctagcctttatttatttgtttgtttgtttgtttgagacggagtttcgctcttgtagcccagactggggtgcactggcatgatctcggctcaccgcaacctccgcctcccaggttcaagcgattctcctgcctcagcctcccaagtagctgggattacaggcatgcgccaccacaccctgctaatttttttattttattttattttagtagagacggggtttctccatgttgatcaggctggtctcaaacttccgtccacctcggcctcccaaagtgctgggattacaggtgtgagccaccccatccggccgaaatcctagcctttatcagaggttccgtggaatctcagaggtctgtgagcaggataaactgctttatggtagtttaaaatgcaaaaccagaaataaaccctcctaaagccagtttgtttccactttctaagtggttacagtgacctgtgttttaagtaccttaaatatatcagtgacctgctgatatacagcttcctgtttcctctgtgtcctgtgacatatcctgacattccttgagccccactcccttcccaaaaggaagtaccttgatgggtgaggacatagggcacacgtgtctctggccttctgtggacataatcacaaaatggtagtcagtcctatgaatttaatctctttaggatataaggatattcacgaaatagaagttgagctctctggacatactccaccttaaaattgctctctccttccgggatcctcaccagctgcagagcagtagtaatgaactattaaattcatttaacaatatcagcatatgctatccttctctgcttgactagacagtaatctggcttgctggttggtatgaatataggataatttcactcacactaattgagatggggagtttgtatgaatggctgaaaaatttgagttaaagataaaaagagacacagcttcctcaactatgggaaataactgggactgttaacaaagatttacttgaagagaaattgtattgctcagggttctccagagaaacaggaccaataggatatatatgtataggaagagattgattctgcagaattgactcacacaacaattatggaggctaagtcccacaatctgttgtctgcaagttggagacccaggagagctggtggtatgatttagtccaaatctaaaggcctgagaaccagggaagacaatggtgtaaatttcagtccagggagaagagaagaccaatatcctgactcaggcagccaggaaataaaaagggtgaactgctccatcctctgcccttttgttttcagaccctcagcagatcgggtgattcctgcccatgttgaggagggtgatttactttactgagtgcaccaattccgatgctaatctcatccagaagcaccctcacaaagacactcagaaacaatgtttaatctgggcaccttgcggcccaatcaagttggcacagaaaattaattaccacagaaatatttctggattcaatggattaagttggtaatatagtattcatattcatttccacgtgcctaaaaagaaggtttttatcctttttaatatcctcagtcctattaaacatacctcacattcatgttccatggttattctcttattatgttgctaagtgcatttctacttaggccaatctgattatagtgattcagattatagtgtttatcttctttcctttatacagtagacagtgttcgcaaaccataggagctgaaaaaatttccttcttatatagtaagttttatgattccagttttccaaaggggtgcttatgttatggttataacagttacagccagatgactatcttcatcagcaggtataaccccaaatatttatacattttcatttgtttcaaacataaaatatggtttgcctaaacatgtcattctgccagattggactatgcaaaagaatgttactgttttattttctgcttttactttaacttgttctcatttgagctctaccagttaagatgagaagatgactaaagctagggaagcacattttaaatgctaaataccatgttcatttcaagttgggaacttgaaatgcaagtatttttaacttaatcattaagttaaagtcagtaagaacgtggtatttagcatttattcattttaacttaatgattaagttaaaaatacttgcatattggtttgcttgaagctatggagaaaaacatttaccttttttccaaaaaggtcttaatattcaaaattattgtttcaatcttacaaattaacaatttacttatttttgatactttcggccttttttatgtgggctacacctaacattttttgaaaaatacatactgcttttcctgtaggttgcactttgtgatcctgtgtgtaattcattttcagtggttctattttatttattttttgttagtttgtattttcttttgtttctttttctcaatttttaaaattttaaaacttgtccttttcttttttttctttattattgcactcttctaccaaaacattttcagtggctttgaataaaagtatcagaactttcccgtggttagcattagctctgagatttgaacaggatgtattaagcagaggaggagggaaggccactaacatgtatgagctccactgtgtgtcaccctctctgccggatgacttacatgtggtatggtatctcattttcccagctctcctatcatgtcctgcggcatgttatcaccacttgataaaaaaattgaaacatggagtgcttaagtttcctgccccaggtcacagctgatctgaaaaagaaatgggattcaaatccaaatgtgcttaattgcaaatccccacatgactctttccttccttccttccttcccccgttgctgccaatgtaagaaggaacaccactccctcatttgctacagagaagacaggggcagctgtgtaaaggcaccaggaatatgccctgcctccttccttccacttgaaagcaacatctggatagacactcaactgcttttattttttgaaaaatgattattaatcaggattgaagtggagggaaaaaatcaaaacgaatgtttctttttaaaatgaaagatactgtttaattatttaacagccttccggttttagttaatatctttgaagactttggattaagattccagacattttcttgaaggatgtagaaaacgtatttaacttcaagtttagtttcaaaatgacttagctatcaattcttctcattgaagtcctctttgagatattatatcccaaatgtaatacacaggtaataattcaataggaatacttggaacattggtgatatttgaataaccttttgaatgaaacaattgatttgatctcaaaagatagtgaaaacgtctcattttgttttttatgttaaatatgcttcctcttaagtcaaaattcttttttctttttgcttttaagctcataaatactctgaattctcactaatcttttggaaaattgcttgtataggtattataattcacttggctcatgagttacataatatagcagtatatgttgcaattcaaatattgcttagcagtattagttgaattcaaaatagaaatcactttctttttgacaactagcataatgaattcattgactattgtcaaatttatgaagacagaaaagtccttttgtgattcaaaaatgtgtttattgatgtttatatatcttttgtcgtgtttccatactgtctcatgaaggttgtcttcgtaattcagttatctaaatacatcatacatttaccttttccctggggtgccgttattctacaacaggctaattacagatatctgtggtttctgcaggagtcttagtgtatgatattgatgatatcatcatttactttcaaaattgcaaaatagtaatttaggaaagcatggggatttggaaaaacatgtcttcagcaccaactgtttttgctctttgcatgcttgtttcgtaaagaactctaatgctataattgcaaaatggaccattttaaagatttttccttcattctgtacttgggagtggtgaaagacatccttactgtgctgcacagtgtctcatggtgttctcttaaacagcattaacgtcttgtatgcgctgctttactaaattctctgttctgagaaataactgaaaatacggctttctattaaacgagtggattattctgttgttgttggcttttttttctcaaacctccttctcttctactttatagttcctacaacagcagccagtacccctgatgccgttgacaagtatctcgagacacctggggatgagaatgaacatgcccatttccagaaagccaaagagaggcttgaggccaagcaccgagagagaatgtcccaggtaagtctggctcttccatcattcagccctacgatattgggaaacctgagcttgcctctgcctcagtctccccacaggcctgctggctttatcaagatctttaaagatgtaaagttctaattttaaatgtttactgtgtgggcacagtttgtgggttttttgcatcctccgtgaacatgctgcctaggaaggatccaggtatagttggattttgtaagcacaaattaaatgatgtctgtaacattctctctggcgaagaaaggtacttggcattattattctgtgtatatgtagtacctgtaatcaacatgttgtaaattaaaatccatcaaaatgctctttagtaaagatgaggttttgtattaaatcccagactgttataattgtgaacctacgattgtttacagtctgtaaaatcatagagacttaaaactgagctgaaccatagtgattatttcatctagtctcctaagtgatacatagtggaatagaggttcgagagagtggcttcccattttagcacaaagcaaaatcagtgagccagagacaacatttagaatccaggcctttcttgctcctagtacagtactcctttcattatactttgctgaaaaaaaaaaaaaaaaaaaaaacctgttttggtttggtttgtttttttttagcaggtccttaattaagcaaattaaaaaataacttatgtctaaaacatggctaatccatatatactatcaactacaattgaagctatgtctgctaccaggcactggatgttgtattggagtttgataatatggaggattttagcccttgctcagattcctcattcattcattcattcaatcaacaaatatggacttattattttccagtcacttttctgatttgtagtctacaaacctaggagtgaatgtggggggaaaagaagtaggacataaaagtgaatgaataaagatctcaggttaaagtaagccattcatttttagtgttaatattctgtggcaaatatcagaagataggagaaatttttgtcttagcacagatgcttaatctcttgagagacattaaatgcaatttatgaattagactgctgcgtattttctaagatcacagtcagtctttagtagacaattaatctttcctgtaatttctgatctgggtccctgctgaccccaggaagattcctccctcccagggccaaatgaatggcccctgagcatgtctttcccatgcaaaccagtcaatcaaaagctccttactcccaaccaccttcttatactctgggccactattcacctgctctaatcaccccaggaccaggtaccagaccactagggacaacctcatgccccatcaccattatttgaactaatcagtcctaaacccgcctaccctgcttcgctcattctttccatgaaaaccacaataaaaggctcttgctcatgttttcccctcctgaccaaccctggtgcttcccatatgaccctgcatgtagtggcatgtaccggcttcttgggagctgagtaacaaactgtcttttccatgataatcatctcctgacctcttggcctcacctgaataataagaaaatctacccttgaaaacataaaactaatagtttatctagaaaggtacaacacaggtactgttttttgtttgtttgttttgttttttgtttgtttgttttgccttaagatgaataacaatacttggatctactttggtataataacataaagaggaaaaaagccttataatcacagtacttttggctctggaatataatgtgcagttctagtggctgcccacgatgaaaacctaacagctaattgaactagaaagctagccacagggaattattaagttttcacctgatgccaagaaaatcagatctttccttaggaaagacacaggcactgttcggaaagcattggaggactatgaatcatacttattgccactgaaatgtcctcatttgaatttacatcctatctcccttctttatgaagctttcagaggcttcctgtgccctcacaaatccacttctgggcacatgaagtcgtaaaaaaagaacaatgacaaaaataaacaccgaatgctcagcttgtcattttcagcgcctaccactgtaccctgactctggtcttcctaccacctcttccttctcaactgctacccttgctttctgtacagcgttaagctgctgttctgatcaggccactctgctcatcgtctgttcatctcatcttgggcttccctttgcccttggcattgagttcttctggaaatgccctcccactcttcttcacgctgacacatctcacccattccttacaccccacttcatactcagaatgagacaggcagtcattgctcttacctttcatttaattctaaatatttgctccccggttttgttagtgatttctggacacacctgcattatctttccaagctggatagaaaccttgagacctcaagtcatgaagcctgctacctgcattcatcgtggacccactgtagcattttttttaatgtgtgtttttttaatcctggattttttctcctagtatatcttgttcatttttgaccttattaagaaaacttatttcaaattctctgttagttttagatgtgacaggtcttctttaaaataataatttaacttttagcacatctgtgtaacttgtgacttagttcatgattttgtagattttgttcatcttttagtcatcagatatatctgatataacctaagagatgttgtcccagagcagagaatgttgtctactagattccagtggtcataggaatgtgagacacctgaaatcaatatgtatcttcatagtctgtggtgctgaaatctagggacttttcaactttaaacttgcctgcctcttaaatctctacttagtagtagtcattttctctgcatgaaacagccaagtctttgaagattgataaatccaaatgaaattgatacctttgtgcctgcagtggaaaattgctttataagaatccatagagccactgcaagggccaggtcctgagaattttaaattttaaaaattgtgcggttttttaaattaagttttattgtagtttttgttatatgttttcttacaaatacagaggattttggaattttttcatattttggtttgttgttgccattgtggagtataactctaaacctgtagatttttgttgctaaacctgtagatttttgttgctatatgtcgtgactagcatctagtcaaatagaaatctacagctgaaccatgtgtgagcacttttattacttataaacttactacttttagtatatgcttaaaatgaagtccttcaaattgaaagctgacccaactcataggtttttatttcttttcttttttggagatggagtcttgctctgtcacccagctggagtgcagtggcacaatctagactcactgcaacctccaactccctggttcaagcgattctcctgcctcagcctccccagtaactgggattacaggcacgtgccaccacgccgagctaatttttgtatttttagtagagacagggtttcaccatgttggccaggatggtctcgatctcctgaccttgtgatccacccgcctgggcctcccaaagtgctgggattataggcatgagccactgtgcctggcctaggtttttatttttaagataagcagcaacattttaagagcgcccctttctcctgtcactaaatataaataaacttagctcacctaatgaattttttattttataataaaaaattgggtaccacagggtacaaaaacatgatctttagagccacagagatcttggtttatattcttccctctcccttttttacctgcatagcctcgagctggtaccttaacctggttcgtaaaatgggatggccctggctaatctcacaagctgttgtgaggaatcaattaaattagatagattttgtaaagctcttaatacagggtcagcagtaatgctacttgttatcagtcccacagtgaaattcactgttcacagggagatggtcagcctacatatagtgtgtattcatttgcagtagagtcttagtgggatggtgcaggtgatttgtttatttgtgggggtataggatattgttaaattgttctgaaaatcaaaatgtgagttaatttctatagtaatgcttatttgcaactcattagctaaataaatctctttaattatttcatggattcccccagcttaaagcttaaagtccagtttcttaaagtgtatgaggtaaaatggaaaaaatgtaaatgtaatatgggaaatcagttctcacattgcagtagaacattgaacttctatctcaaactaattttgagattccttgcttgaagaattgttggtagagtaccaccactgtgaacattcccaaagcaggaaattgaaatatttatattgcaaggcttatctcatctataaagcaaagatggtcttccatttcccccttgcccacaggttccctttattaacttggtagaagcaccaaagcagatgggacaatatgtttcttttcttccatgttctattcttgttcattgcagcagggcatttgtcccaattttgctgtgaaccttgagattatttttgatatgcttttcaagtgtaatgaaatatttattccatcttgtttcctccatggttttacaaaaacaacaagaagaagctaattgcctatcatatacaaagaatgaatgccaatggacaataaaatctgtaattaggaacccacatggtgatttgatatagtattgtctcatagaagtcttctatctatagttatttattccaagcctctttttctttcccatcttgaagtatgttagaagagtctattccttaaggctaagtacctacaaaaaacaggctcttataatacagtaatcaagttttctcatgctttgggagtacacagagtatgcaagtacacatctggcaccaaaccaatattttgtttccttgatctttcttcattttacctagttcagagttgcacttcaaacaaattctacttgtcatacacttgaaaaggcagctgtaggtggtaggaagttaatattttctttgaacaacatacagaggtgcagacttttactttttgtatcaggttaatgagtgaacttctctcagggaaatccaggtgaacatcaaagttgagagcaggaagcattgatttcctacaaaacacattcacctgatatcttagtcagtttgtgttgctataatagaataccccagcctggataatctgtaaagaaaaagaagtttaaaattcggctctcagttttgcaggtggggaagtccaagaacatggtgctggcatctgttgaggacttccttgctgtatcatatatggtggaaggaagaagggcaagaggagggcaaaactgagttttataacaacccacttctcacaataacaaacccactccccccataatgatactaatttactcatgaggacagagactgaatcacctcttacaggacttacccctcaacattgttgcactggggattaagtttccaacacatgctttttaggggttacattcaaaccatagcagttggttactaaattagtgctacttgtaaaaaaatacatgtttgctgcattcagaatattacatgttttcttggagtttttggaaggacttagcgtaatccttgctgttcatgacttaggttggcaagctcaaagggccttaattccccatcagttctttaaagggggataggtcttaggatattagacagcagaagtcttctttttcttcccccattatgtactgctttttggcattgtattcatgacacacacacacataaaatgtcatattttctttaaagtcaaaatatacagtttaaaatggtttcagttgctttcataagagagtaaaacttaggtgttcagtttaatattggaagaccttgttcagttaatgtgtgccttccatgaatagttggtatttgttcacatcaaatcaaatgactgtcagttctcggggtaaaaaaagaccaaccttgactcaaaaagctatattcctgcaataaatatgaacatttatgtttaatatactgctgtgattaattatttatatcctagtgggaggtcaaatattcttcagataggaaggggtatgtaataaattttttaaatatctaaaatgacaaaaatagaggaaaaacataatcatccatcctattaagtctgtattcaaaggatgaactgatgattttaaattcaaatgtttccttaatttataggtcatgagagaatgggaagaggcagaacgtcaagcaaagaacttgcctaaagctgataagaaggcagttatccaggtaaaacctgaacccatttcctaccaaacatcacatgccagcagtctttttaatgagtgtctgcaggtttacctttatctgccagcacctcacgtgtgattgttcatagtcccatgaacttcagctgttcttaatcattgtctagtaattgagttgtttaaatcctgccttatatttgctcccaattatttcaagttataattcattgccataaaactcacattgtaacttgcaatctactttttattaataatacatcttttcagtcaccacaatcttctgctgcttctccctccagcaaaaattatgagaatttgaatttttgatggaaaccagtctcaaaattaccttaagtaaaccaacagtttattatggtcaattacttgaggtactgttagtaagagagggatttttttttaatatgtaatataagagtttcaagagtgcatatatttatccaaagttattagtcaaatcagccttcagagagcctatgaaatactgattttcaatgagaaagtaggtttgatgagggttggagagtgcaagaaagtgaagtaagctataaaacgtagaattagtcaatgttggaatgactatgcagtctttaggatactttttagcactagaagaaaatggaataggatgtcttttttagaagacttgaaattgctgcttcatcctacttattcagtccccatggacatatgtgtttatgatggcagcatttccaggagaaagtggaatctttggaacaggaagcagccaacgagagacagcagctggtggagacacacatggccagagtggaagccatgctcaatgaccgccgccgcctggccctggagaactacatcaccgctctgcaggctgttcctcctcgggtaggtctcgctgcagccgagttcacacttcaggtcacagcacagacagtaagggtggggcactgggaactggaagccatacaaaaagaatgaggagaaatgccttgagcactgttattcagaggttcaacccctgtccattccatcttgaaggtcaaagggtcacagggcagctacctccacaaggtcatctctacacagcaggtactcacacttccccacagagcagccagacaggactcccagggactcacattgcaagccctgacttgatttaatattcctgaggtggtgacaattgatggcatagttcaagttcgaacacaaaagctggaaggatgtcttccagtcccttcaggctgctgtaacagaataccatagactgggtaccttatcagcaacagaagtttatttctcacagttgcagaggctgagaagtccaagatcaagacatcagcatacttggttgtctggtgaaagtttgcttcctggttcatagaacttaaattttgtttatcttttatttattttatttttgtttttgtttgtattttgctgtatcctcatatggtggaatgggcaagagagctctctgggccctcttttataagggtactaatgtcaatcttgaaggctctgccctcatgcctaattgtctcccaaagctttcaccctcaaatagcatcacactgtggcttaggtttcaacatatgaattgggggtgggagagacacaaacattcagaccatggcaaaggattttagaagtaaccttgcccagccccctcatcatgtaagtataataatataactaaggtcaaggaaagttgagatttggctgagttgtaagaatttttagtggaccagaaagaattagaactcaaatttccatctcagagcagtggccatattctctgtggggaagcatttgtcagtcatgacattagcaatgatgagacttattcatggttttcagtgatcattgccccaaaaaggcatgttgagtggtacaggcatagatgtgttcaccggcattctgtgggagagcttacttggaatggaaggaactttctgagcatgagtgtgtaacttatgtccacttgttctttttttttttttttttttttaaatgagatggagtctcactctgtcacccaggctggagtgcagtggtgcaatctcagctcactgcaacttctgtctcctgggtttaagcaattctcatgcctcagcctcccaagtacctaggattacaggtgagccacgacacccagctaatttttgtattttagtagagacagggtttcaacatgttggccaggctgatctcgaactcctgacctcaggtgatccacccacctcggcctcccacagtgctgggattacaggcgtgaaccaccatgcccagccatttgttctttctgtttgtcattgagcaagggatattgaaagctctgcctgtgattgtggaccgggccatttttctaaacagtgctatcagtttttattttgtatagtttgaggctgtgtttttaggcgtgtaaatgttccaggctgttaggccctccttgagcctcttcttatgaaatgatctttttatcctttgtaatgttttgctccaaaatctactttaatattaataaagctattccagctttcttttgattaatattaatgtggtgcatttttccatccttatactcttattgaccttgtttgtctttatatttgaagtgtattttttgtaggcagcatgtaattgggtcttgcgttttcctttggattgggaagaccatgtacactgaatgaggttatggatatggttgtcactgaatctgtcatcttgatatttgtttgctatttgtccagtctgttccttgttcttcttttttcctcttttttttttggattaattagaaattttttatgattctattttatctcttttgttggtttgtaagttacaactagtttgttattttactggtttatctcctttgtgggtttataagttataactagtttgttattttactggttgctttaggcttatagaaaacattctaaacttgtcacgatgatgttatgtcagttcaaatgatattataccactccacagacagtactttacaaaagtacttccatttttcatctctctctctctctgtaagcggttgttgtcatactttttccttactacattgttgatgtttttctttaaacagttattttttaatgagttgtaaatttaaaaaaaaaacaacatgtttacccatgaagtcatcattttgggtgctgtaaactctttgcgcagatccagctggtatcattttccttctgcctgagagatttcctttaaaatgtcttagagactgggcttggtggcttgtacctgcaatcccagcaactcaggaggttgagataggagatcacttgaacccaggagttcgagactgcagtgagctgtgattgcatgactgtactcccatctgggtgacaaagggcatcctgtctctttaaaaaaaaaagtttgagtgcacataagttggtgatgaaatctttgtttggctttgaccaaaaatgtcccttttatacctttggttttgaaaaatatttttgctgggtaaaaaatactggattgaggtttctctttcactgcctgaaagatgatactctgctgtcttatttgtgttgatatctttatctttatttctctaaaaataacatgtcttttttttctgtttttacagttttctctatatcactggtttttaacaatttaattttgatatgccatggtatcattcagtctgcccttaattccatctggccgtttttcatcttatcacctcacatactgtagttgttgtatatagaaatttaacctgggctacccccaacacccataatatcgtctgtatcttaacttttgaacctatggaatacagttattatatgaaaactgtttaaatatccatgtttgctaattctaacatctctgtcaactttgaatcaattttgattgcttattattacatgtggcatttccctgtatcattttatgcctcataattttttattaaatgtcggacgctgaatttaaacctgttgaatgctaggtgtttttgtaatattcttgagcttttttctgtcacatagttgagttacttggaaacagtttgatccttttgagctttgcatttttagatttgttaggtgggatagaagcagttatcagcctaggactagttattccttactagtgaggcaagacccttctcagtcatctaccatgaatgttaagttttctcacctgactcgtgggaagaggcattattcctgtccctgtgtgaacaccaagcactgttaatgctaattctttttggtgattttccccctggcttcagtttctttcacatgcatgtacccatcattactcagctatattctcagggatcactctgcacatctctggattctcttttggagcaactctctcctcaccaataccctgtcctgtgaattacaactaccttgatctctccacacacttcatgtcctccactccacgagtcctctaggctctgtgtgggtttccccacctgaaaccatgacctggaaattcagggccatgagtttggcagctgtaagtcctcatttgtttccccttttcaggaatcagtgtccttcacctgatgtctaatgtcttgcagaaatgttgtttatgccaggtgtggtggctcacgcctgtaatcccagcactttgggaggccaaggcgggcggatcacgaggtcaagagatcaagaccatcctggccaacatggtgaaccccgtctctactaaaaatacaaaaaattagccaggtgtggtggcgcacacctgtagtcccagctactcaggaggctgaggcaggagaatcacctgaacctgggaggcagaggttgcagtgagccgagattgtgccactgcactccagtgtggtgacagagcaagactccatctcaaaaaaaaaaaagaaacgctgtttgtatatgaatatattgtccagttattggtggttcaggcaggagggtaaatccagttcttctcactcaatcttggctggaattgtttgtgcattttatgcaacttaaccagaaagtcacccatttgcaccgattttcctcaccattttgatttttctttctatggataaagttacagtgcacagaaagccatgaggagccgttaaagagctcgtggcattcttccaagacgtaagatactatttaccctgttctaccgatgatatcactgcaacctcgggagatggagcggctggttcagggtgacactgctgggaagggagagggtagagccgcgagtcactgtggtgccttctcactagaacgagcttcctctctaaacaaagagcttttgaaaaagaatattcatattagcgttttcattttctatttgccaaaattctctatcttagcaaggcacttgtcaggaaatttttttttatatctctgcagaacaaaagttccttggttcctctcttttttggagaacacgctttcaggagaggagccgtgtgatcatttgccagagaaggataggctggtgggtgctgagaccagaatctttatagcagaaacttgtgaagcgttccagctgaaagtccaatctctaaagtaagatctttgctaaatggacattgatgggactaaaaataagctgagggctgaatggaggctttaacaaatgtacatttaaactctcagtttagtctcatcagccatcacaggaaaggcagtggcaagaatgtttgccgaagtgtcatcttttatcaaaggggataattttagagtggttgtaatcgtgcttattgtgggcctccgcattgcttcatatggaattaggcaacatgttcatttgaaaaaaaaattaaaaactggattaggaagaaatattttactgtcaaaaatcagatcactgttgttgattgatctaaggattcctgttaaattcttaactcggatttatttatttatttatttattttctctctctctctctctttctctgtttctctttctctcctgccttccttccttccctccctccctccttccttcttcccttcctttcctttcctttccttttctcttcccctcccctcttctcttctctaatcttctcttttcttttctcttttcttttcttttcttttgttttcttttcttttcttttcagggtcttgctctttcacccaggctggcatgcagtggtccagtcgtagctcactgcagccccaacctcctgggctcaagcaatccttttgcctcagcctcatgagagttgggtctacagaagctccaccatgtgtggctaatttttaaaaaatttttgtaaagacagggtctcgctgtgttacccaggctagtcttgaacttctggcctcaagcgatcctttcacctcggctttttaaagtgctgatattacaggcatgagccaccatgactcacctttaaatctttcctttgtaataaaatgtggctgggtggtcacaggcctggagtctagggggcattacttgccatttttgttaagttaccatctttaggtgttcatttaagttttaatgttgtatggcttgacctggcacttaggtctgcactttggcaggcacaagaaaattgtaaataccttcttttttttttttttttttttttttttgagacagagtcttgctttgtcgcccaggctggagtgcagtggcgtgatcttggctcactgcaagctccgccttctgggttcacaccattctccagcctcagcctctcaagtagctgggactacaggcacccgccaccatgcctggctaatgtttttttttttttgtatttttagtagagacgggctttcaccgtgttagccaggttggtctggatctcctgacctcgtgatccgccagcctccgcctcccaaagtgctgagattgcaggcgtaattaaatgccttcttgaggacttttataccttcctcttgaagacataaatccagagcttactggtggttgtctgaaaaagatcacatcttgtaataggagtcatacataaatatttctgagatctccctcatacttaaccaccgtgcctggaaaatgcagacaactgtattcagtaaatggtatttgaatataagtaaatcaaaagtgtcgtttccatagattctgtagatgttaccacttagaataattacctgtctaacccttaacaaattctaccgtatattctcagactttgcaaacacgggattccaaaacaatgtggattgttttcagtttctttgaagctcagatttaaatcatacttttactcagtttttaaacctaaacgtggaagtgttatgagatgttgtttttgtgcagctagaattccttgttctactaatgaatttcatttcctgagtccctgtgtctgagtatactgtatgtttcaaatttctgatttagttatgtacctataggcaaatacactgaatggtcaacctaaaaatgcattgtttgactcatatttagagtcatacatatataggcacatgtatttaaaataaatactttaggctagatgtggtggctcacagctgtaatcccagcattttgggaggctgaggtgggaggatcccttgagcccaggaatttgagaccaccctaggcaacatagaaaggccctatctctacaaaaaaaaaaaaaaaaaaagatttttttaattagccaggcatgatggtgcgcgcctgtagtcgcagctactctggaggctgaggtgtgagtgtgaaccaggaagtcaaggctgcagtgagctgtgatggtgccactgcactccagcctggatgacaaagcaagacgctgttccaaaattaaaagttaaaaaatgagataaatacttgaaatattacaattattaaaatagttgttttccccatgggaaaaaaaagttgagcagagctgtgtctttgcactcagaaaaaactcttactctgttgaaggctagtgactcttctaaacaccaaccccttcacctttttactttccttagactttctttggaaaatcaaggagttagcactttttccccctggaagaattaaatgcctctccagaactgcagcacaggaggttaacttctaccacctttggaggcctgcaagctaccagattaaatacttaaagctaagcattcatcatttcttaacctgccctctacagtcatgcacttcctgctttttactttgtcagggctcgtactcaaactattcatagcttcatgaaacaggaactaaatgctgtctgagcctttccccttgtaactctcagcgttctgcttatccttcatagacagaagatgatgatatgtcctgactgttgaagagaaattagacttaatgtgatcctgtacagttaaaccaaaggccagatagggattttttatttcaatcaactttctattgtaggcctaggtttggaaaaccttagcaccccctaatttgtaagacttgaactgttttaaagataagggatacacagccaaagctttctttgtaattctgagatttttggtgtttttacagatacttagtctaaatctttcatcagacagttatcatgattattattctgacttcaacaactgcattttctaaagggaagtgagaattaggaaacattttcctgtacatctgtttatctatcccagttgtgttgtttggattttttcagtgtcttaacgattgaaaccatcttatccatactgaaattcatttcatgcttctatctgctgcttcacattcaggctatcagtttaattgagcaaaaaaaaaatgttggcagtttctatagcatcggcatccttctttggtttctcatttttgaatggttcagccacatgttaaattttgctgagatctctggaaacttcttcacataattctttgatagaacatgaattctgtgagactcttcattaaagagcacggtttcatcactaagttgagattttgctcaaggctatttggtaaattccagcagaagagcaataaatgttcaacaagaaacagccgtcattggagataacaagggtagacattaatgggaggtttgtcacaggtaaacaggtgatggcatgagaaggtttaaaccacctcataaataaatttttcgccactatatgatgtggattacaactaaaccaaactttaaccaatgtgggtgttggtgtacctttcttttctaaagcaaaaaagaaattgtggtactaaacttgagcttttatatgataccgctaattgcccttcacccaacaaaccaattatttctacccatcacttttcgttgcaaaagaaattatcttataaaatatatgtatatagcatatatctccaaagcaaatatgggacatctgtacctcaatgtaactgatagtaagttaaaaattatttgctgagttcttggtatgtggacagatgaatattataatgtttaaggcattccaccagcaggttttgaatttaaccaaaattttatgaagctaatcagaatggaattaaaagttgaaagactgccaggccaaaaagatcatctttcagaaaagtaaataattgctctatacttacatatttattatttatttgttcaccatccgtttatttttagttgagttctgtatacattggtgagcaaagggggactcattagcttgggcactcctaagggcaaacccaataacagatagtgaatgggaaggaaaatgagagaattagcatttagtgaacaaaatcttataaactatgctgaatggtatacatgctctttcagtaaagccactcagtactattacttccctaccttctgaatgtttaccaagttcgataaaatcttgctacatacaaatgggaagtatgtaacaagagatactagtggtttctgggtttaattaagttacatagaacattaagaagtatgttgggaaggcattagcttaaaagctgtcttttgccactgaggccatattcatcacccagattccctccacagtggagcactgctcagtcactgccttcagaatgcaaataggtcttcacaggatgctattaaaacccatagcaccgtatggttttacgctctgctttcttccagcaaacctacgtattttaatgttaatatatatgttcattttatctttgagaatgaaaatgtattatgaaaatataaatatttagtttttgtagacaaatagcacatttaaagatccagtagttattcacctgcctggtatgactgatagagaacagatgggtagcaaagaatcctcaccctggaaacatgtacgcatacacacgcaaacacaatctcgcataagctttaaggggttcattcattttgtgaaggttgaccatggataccagtttaaagatgccaggtgatgtttggcttttaagtatcatcaccttgagtttccttatataaatgttttaatatcaacaaaaaactcagaatttctaataggtcataacactgcctaggtatgggaagaggagagggtaaaattaaaagaaatgcaaatgtacttttctttgaataggctaaccagttagaggatgtatgaagcaggaccaccatagtccaagtatgaatatgcaaaattaaagcagattgctgtaaatctctcttaaaaagtcaagaatatgtcacagttggcatttttcggatgatcagaccgtttgacaaatctctgcaagggtccgagttagtcgaacatatcttttgcttatgatttcagcaacactgtgcgctttgccttctgggttgtattactaattctgttcatcattaagtgtacacatgtttcactgtttgactaaacaaagcttgaagacatacaagtccaaacattttctgtcctttctgtattcccaggtcagaagatcttagctctttatccattctgtgctagagtttgtctgaaagcatgaatcatggggttgtgttgggtgctaaatttcagttctatatgctgccttcactaatttatgactgtggtctgaacaaccaaaataaattatttctgagaactagcaaaataccctggaaaaaatttatgaaacctaccagatttgtaaaaaggtcagccaggcgtggtggctcatgcctgtaatcccagcactttgggaggccaaggcgggtggatcacctgaggtcgggagttcaagaccagccggaccaacatggagaaaccctgtctctactaaaaatacaaaattagctgggcatggtggcgcatgcctgtaatcccagctactcgggaggctgaggcaggagaatcgcttgaacccgggttgcagtgaggggagatcaccccattgtactccagcctgtataacaagagtgaaactccgtctcagaaaaaaaaaaaaaaaaaagaaaagaaaaaaggtcactaagtgatgagagaattaaaaccactcctattttctaccttttataacataaactcttgtctttacttcccaggtttgccatctttataacctgtaactaggagcaagtgatttaataaagggattcctcctattccgtctgcaaattggagttaatttttctcctctttctgcaatttctgttgttttagcttttgttagccataattagaaaatcaaaaggattcattgaaagttgagacaaaattgtgaagtaggaagatgtcttcctccgtaagaggagaaagattgttagaggaagtacatggaggctttggtgacacatccctatgaggaagtgatctgcttccacgggaaggagagaacagatgatagatgactcctagatgctcctgcgtcatgttcagtacaaaatcagagccgcatcagcaaaccggataccctgggaaggaacattgggataactccttggccataaacaaaagttttgctctggccttatgaactaagtggattaatagagattagttgttcaatatccttccatctaatggatccatattgttaaaacttaagaaacaccaaagggggagagtgtgagaatctactgccattttctccattgcttcattcaagacttctgtgtccaccttggcatgggattatcatttgcccttttatactcaccttaaactacaaagatcatttgtttgcctttctgaagaaaggaaggtggataaattttgcaggagactttaaaaattcagctcaactcctggcattaaagacaataaaggtggtgattcagaggtccccatggcagtttccccaaatattacgtttaactaagatcatctcaagcacagagagacttaactctctaaagtgtgatttttaaacctgcacacggaaattttctacattttatatgctcaagatttcttgaaatccagggtgtaaaactgtgaaaataatagttctgaacctatttatgaaagcaggagagaattgctttgttcagttttggaaaccaccagggtgcaatttaatgctccaggagagggttttctgtgacctggaaaggttggggtgattcccgtacagtgagtcatttacttccttcttggcaggattatgcccagggcttttaaacgctcttgacacttcactgccttccataagaaacgggtttagggcacaagtgtctattatgataagatgccagatttctagatcaagcataaagctgtggagtgggacaataggacttaataattttaatacacttcccacgtgaactgtcaagtaataagctacatattcagacgtgactggcattgagtcatcctgccattagtcaaatgtatgagacttttcccaagtcccagcaacaccaaatttgagaaatcgtataaaagaaaaatgaaaaagtaaatacgtctaagaaatggggaaatcaataaaaaatgtactagcaccaggggcggtggctcacgcctgtaatcccagcactttgggaggccgaggcaggtggatcacctgaggtcaggagtttgagaccagcctatccaacatagtgaaacccttctctactaaaaatacaaaaattaggtcggtgtgagggtgcacgcctgtaatcccagctgaactcaagaggctggggcaagagaattgcttgaacccaggaggtggaggttgcagtgagttgaggtggaggtgcaccactgcactccagcctgggcgacagagtgagactccatctccaaaaccgtgttagcttttatcaggaaaggccattaaattttcttcaatattacctacatcaatttgacatcaaactataagaacacaatatgtgagatgttttgaaattaatgaaatgaatcttctctttgagacgagtttgtgcacgctatgaagtccattaaatattttctgggaagagttcccagttaaaactactttctaaagtacccaagcacactatatagatacatcaagtaggtttattaatgtcagtatttcggtgaaaattgggaaggccactattctgagtagagaggtgtttgttttctacttgaagactatgaaggatattctgcactactgggcctatttctgaaattgtatctagctgcaagttactcattaatttaattaacaaatatttattagcaaccaaattgtggcaggaactgtgcctagaggtagaaatacattacgctcttgtttccagagaggaaaatgagtaatgttctaaaatgtaaatcttatgtttctctttcctcttgctgtaaatgatgtctaagccatttcggtggtgcctgttcttaatcctttaataaattattttgaatgattttttaaaaggcagtgtgattgtgaggtgagtttagtacaaattaaaaaatgtcacatcagttgcaaacagacagcacataattatgagctaaacactgtttcagaaacagtagtgacaataaataggattcggtataattagtcctcctgggacagatctcttcctctgttctttgccatatattttaataatgagattagccatctaatgccaatataaccagactgtagtattaatacacagaaaaattattgctagtaacagaagatttaaagacatgagggtgatccggattatatgcctgcaggttaaaaaaaaaaaatgtttcttaaactctctttatcaatatccttttcgtgagccactgaattcttttgtttttctgatcatatgaataacccgtcttaagtatgaatattgtgacaatagtaatagcaattactttaagagaatatgtttctatagagataacagaggggtttttccctaccattcctgtatgaaggtttctgtgtttttaattaaaattttaagaaattcatctttgtcttagcataataaaataaacctcactagacaatcaggacaccttgttattcttagatacattattatagctcaagaaataacaaatgttaagcctggaggatttgtattttggccaaaagttgtgagggcaattatttatttatttgagtgaaatatgcaggaatcatatatcaaaaggagggaggtcttttttttaacctcaacaaaaatataaaagtatagggaactgttatctatgtgaacccagcaaatctgagacaggtctcagttaatttagaaagtttattttgccctggttgaggatgcacctgtgacacggcctcaggaagtcctgatgacatgtgcccaaagtggttggggcacagcttagtgttatgcatttttagggagacatgaggcatcagtcaatacatataagaagtacattggtttggtctggaaaggcgagacagcttgaaacaaaaagcaggaagactcgaagtggggaggggccttctaggtcagagataggtgagatgaacagttgcattcttttgagtttctgattagcctctccagggtagacaatcagggtgattggctctaagcagttcccagctagacttttccctttagcttagtgatttgggggccccaagaattattttctttttacacctgtgttttttctttcttaactaaaaatagtatttgtttctgagggatagagataactaccattttatttggtatgatttatttgcctaccgtccaacaaagaaggtaatctgattttgttttcatttccaagcatgattcctagagatgtgtttaggtggccaaatcaatgaagcagaaccctgcaaattcatttattgggagatatcctaaggtcttcctgaattatctgatgttcccaggctttgcttatccaataggcattaggaagaaaaggcttgtgtttatgtagatgcacacaaaatgcgcatctcagcttacataaacagtgaaggggtttcccaggtctcattatccctggaggagctgaggcctggggagtcctcagagcctcctttgctactctgttattgtggcaggccaaatctcactaatgcaggcctccgtaacagctgtttccgtactgactgagtggttcagttaaatactaaaagctaaaaaaaagccagcgcccttatacagaggctggaatgtaacaaaagcccaccaagagttttgcctaggcctttcctggcaaaaccaaggaattcttaacaggacccatttaggattaacaagttttactgggagtctgaagaaactctacaggcctccaagaacaagtttactggaggtctgcaggaactcctcaaacctccctgatttagcaggagacaagataagagtaatcaccccagcacctagacccatttagattaagtaaatttactgagactccagaggaaggtcttcaggactcagaccttagttatggattaaagaagttaatcacttctgtcatgagatgaatgcacacttacacgtagacatacagcttagaaggcatataagttctggaaactttgtaattttgagttggtctggcactaatttccaggccatctccctgtaaaaggttacaaaaataaaaactctcttcctcccagttcatctgcatctcgttattgggctgtgaggtatagtagcccaaccctcagttcagtccgggaacattattatcaaactctggggattttcaggataagttaggaatatattttgaaggagaatggcagtattaaatgagatcagcaattgaaaacatgtgaatacattcaccatttaattacccatctcaatagaagataaggatgaatttagcactagaaaccatgaatgtcacaaaagcctaactttaataccttgaatcactttccagtaatcctaatcctttatccacatggatagaggacattcctatcttgctctttcttctccccacacattagcttaataattagctaaataatttcatgcattagctaaggaataatggaactccagaaacctaggacagtaattgagagactgaacaagctaaatctgaaccttctgcacaattaaaggagctgatgttagcatggcccacagaatattacctgcacttgtaaaaactagaaagtcaggcaagtactcctggaacagactgtcttttctaaccatgcacttatttctttgtttttaactttgtttttgtttgtttgtttttgagacggagtctcgtcctgtcgcccaggctgtagtgcagtggtggaatctcaggtcactgcaagctccgcctcccaggttcaaacaattctcctgcctcagcctcccgagtagctgggactacaggcgcccaccaccatgccttgctaatttttgtatttttagtagagatggggtttcaccatgttggccaggctggtctggaactcctgacctcgtgacctgcccgcctcggcctcccaaagtgctgggattacaggcgtgagccacggcgcctggcctgtttttaacttcgtaagttgctttgtagaactatcttaaacttggtctattttagattctccttgaagggccagatcacaaagtgattaggagaaggaggctctggagccaagacagtgagactaacccattcttcaaatctaacactaactagctgtgtaaccattgggccagggatgtagcctatgtaaccacaatctcctttgtgcttcatgcctcaccaataaggtggggagagctgctatgactctgtcatagggctgagacgaagatttgatgagttaccagcaaaaagcatttaatatactgtctcattcagaagcagtcaatacacattgaactcttattacttagaggaaagaaaggggtcgatgatttatagataaggcctgagtgaaagaaataaatgtgtattgagtatcagcaatggactacgcatcattctgggtaactatcactgaacacatttaatctgcaaatactatctgaaagatactgccatctgaattgcataggtgggaaaagtcaaggcttttgtgcttatttttaaatgtatgttaacatgaataattaattggccgtgcactggtcgcacgcctgtaatcctagcactttgggaggccaaggcgggcagatcacgaggtcaggagatggagaccatcctggctaacatggcgaaaccccgtctctactaaaaatacaaaaaaattagctgagcatggtggcacgtgcctgtagtcccagctactcaggagactgaggcaggagaatcacttgaacccaggaggcggaggttgcagtgagccaagatcacgccactgcactccagcctgggagacagggcgagattccatctcaaagaataataataataataattagtgggaatatatgctgtttgttgtgataggagaagaaaaggggagatccagatgttggtcatcagaaatgacctgcatcttctctaaattgaaatttagcttgaagtagtaatgccaaggccagcctggggccatggcatcctggtgtacctgcttgttggtgacagtccttttaggacaaaatatcttacaaaaacattcatagatgactaactggaaaaaaagaagttatgatgaaaagcaattcttactgtttttgttttttgttttttgttttttttaattaaaagacaggcagttattctctttcccaggcttgagtacagtcgtgcaatcagggctcactacagcctcaacctcctgggttcaaataatcctcctgaccaagcttcccaagtagctggaactgcaggcatgtgtcactgcacctagctaatttttaaaattttcttgtagagacaggttcttgtaatgttgtccaggctggtctcaaactcttggctgcaagtgatcctcctgcctcagactcccaaagcaatccttacttttttaattgaagtgctttttttttttcttatttaaactcttaaaaattcatcccattttcttcaaaacaataaatcctttacaagggagaaaaatgaaatagagcaactaagaaagcatccatgaaggccaggaaggaacatcatggttaaatgcgattagtcacagccccttctgtctccagtcttggatgaataatggtaacagaactagagagatttctaagaccttggtgcttaataacaagcaagcatcgagggtggttgtgcaagatcctgatcacacaactctgcatatcaaatatccttcacaatcaacaagagtcagcctttaatctctgatgttttcaaatgttctttttttttaattcacatgtataacctatcctcttttcaatatatagagatatagcttatcagtcattacctcttttactacttttcttctgagatttaaaaggtcatcctctgatttgtaaattcaaccagatttcacagttcagatgagagttgtaataagttgccaagaactgttgcaagctgtgatggctgtctttctggggattatagagaagcacatttcttttaggaaaaaagaaggcagatgagcccaagttgttttatttttattgtgtatatgtatttgttttctcaagtacagtagcatggcctctgtggcaggcattcaccaagcaaatacagagcaccctctgggtcaagcactgtgttattggggttccaaataaagaaaaaagaccaaatccagccctgtggatctcacattaaagaggggagtaagaatcatagataatttaatgagttaggtacattaatggggatttgcacagtatttcataggagcacagaaaaagggtacctcgttccacctgagatggcagggagatggctcctaagttaactaagcaaaaggggaaggagaggcacatcccataggatatggataacacaacaaaagctccattaccacccgccccaccaccacacacaccatctctggaataaattttgtaccttccaactggttttcagggtactcatgacacatgggttaataatagctaggtttgcccaaatgaccaaaattctattcccaacatgaattttcacaactggtttttttgtttgtttgttttaatgaagaagaaatgttgtgtttttggaaatcatcttacaaaatcatgtagtggaatgcatatagtgatgaaattgttgaagaccagggaatctttgtccttagtttttattaggatggatgttttcaggtaaaactaaaataaaaatgaaatggaaccaattagaaagaaaataggagcacttaagacgaaatgtaattgttgctgaaagaattagaatctgatagcttagaaagaacttaattaaatttcagagtaaaataaatacagtttagcaatggcctttctcctagaaaaatataatgtctcttacagttcagttactccttggcttacaaaatagtggttaaatttcctgtttttctcattttgatttcgtatgttacatgttactggtgatgggattatctgtgtgacattacctctggtcttcaaaatgtacacgtagcaatgtagtctcacatatgccccttgggtgcgaaaagagaaggacctaacttaacctgacagacctcaaatctgttctctttctatagcagagtactcctatttaaaaagaaaatgttgagtaaggaggacagtcatcatatatgtcgagaatgttaaatgctcttgtggaagtgaaaagcagccgatctaagtaattacccattaagaaaggagtaggagaaatgtttagaaggcagacctgcaaaaaggtgactcacagtacgttcacatgaccggatgcattagtggaacctctaacccatcgccaatggaagaagcagtgttttgcacaaacttgaaaaagagtttttcattttcctcccacagcctcgtcacgtgttcaatatgctaaagaagtatgtccgcgcagaacagaaggacagacagcacaccctaaagcatttcgagcatgtgcgcatggtggatcccaagaaagccgctcagatccggtcccaggtaagcgtggggtataatcatcttctgcagctttgacaatccaggattcttgcttcttgggttggtgacaggatcccacgcattctccgagcacctataggtgttttccctatggcaagagctctttaacttctggtaaattctaaaagcttgtcttagagcaatatgtggtttggcattttctgagttatgaaaataacaaatgtaaaaatcttagtctactgctaactgattgctaaggaactgattaaaaccaatgactaaaatgagaaaaacaaaagttgtataaactaaaatcttgaaaactggttcaactgaagtatggcaggcaatcataaacctactggaatgttgagatttcatgtgagcctaaatgaagcccagtaataatgtattttatactccccggttcccaaaggctgaaaactgggatctaccttaggaaatgtgaaattttacattttcttgaatgaaagagttaaatatatatagcatgaaatagccaatcaaattgaaatacgttgttttctagggggaaatttgcaaagaaatgtatttaggcatgagggtcctgttaagagagcctcagtattaggaatcagaggtggcagaggtagcctttttaattggctgttataagcatacaagataatggtaagtttcaagatcaagtcttaaacctgagctcaaaaagttagagaacagaaataggagaacaagaaaaataaagttgccctttcagttcaacctttttaacagtagcagtgttttgtcagttttcttttggaagtttgtatctacctgcagtgcttggtaagaaaaataacctgggcgacagagcgagactccgtctcaaaaaaaaaagaaaaaaagaaagaaaaagaaccattcctacccccagacattgttgacctggagttgtcatcctttgatgcaggttatgacacacctccgtgtgatttatgagcgcatgaatcagtctctctccctgctctacaacgtgcctgcagtggccgaggagattcaggatgaagttggtaagtaagctgttcttttgatgctgcacatggacatgtattttcccccagaggaaaattgaggaagtgagttatctgtttgaggaatatggaagttaatagaacagcttgccttttacgatgaaactgtcaggctggaactagcttactagccttagcaattgaatcagttcttacctctccatacttgtaagactggaggaatgtcgcctgacttagggtatagttttgtaataattggacacttgttattgaattatacgtggcagcattttttctaatttgcccaatcttgttatggctctcaaattatgatgctttggtactttacaattaatggggaaaaaaactcattcttcatcttttgagtgtcacgattgttccatcttacaaatgaaaaagctcaaacttaaaatttgagtaacttactggcctgtgtcacatgcattataagtagcacagccaaaacacataactgtgacttgtgactttgaggttattgttatattcagtaagtcacaattctctttgatggctgagcagggaagccatgagtgttctctgaaccacatcattgtttaaacttaaaagatagtgggctattaaacttatattctgaaataattgtactctcacaagaacttggaaaaatagtacagagaggtctcatgcatccatcacccacatgcctcaccagtgacatcttacgtaactatagtccattatcaaaaccaggaaactgaccttgtgtgcccactgtcttttatgtccctagttttcctaatgactaatgatttcatttaagatctctcatttctgtttctcttggaaagagaataaaataccacatgagtctctgtcagctgccaaaatgcccataactgtttaacttacttcacaaaggtacatagatgacgattatgttggtgcatctttcaatataagcatatgtacctatactggagatttagtgtgtagtctaccaacatataagcaatatgtatctggcatatccttccccataaagaatcctaccctttgttaattgggttggaaatagatacaggttatcatctggaatcagagcacccaggatgttgtagatggatgtacccattacagtaagtccgactttgaagtgcctgaaacaccgctcaagggaacagctggccctcactttttcccattttatgccagtgttattctgctcattctttcctgatttatgtggccttgtaaatattgtttgtattgctgtgaaatatttggcatgtgtcaagtgatgatgttctgttcagtactgcacattaatggacggaatctgaaattatactttgagctacataacttgcagaagaaacttcatatgtcagggaggtgcagtgtcccagaactttgggaggccaaggtgagcagatcacctgaggccaggagttcgaaaccagcctggccaacatggtgaaaccccctctctaatttaaaaaagaagagaaaaaaagcaacttcatagtgtgccaagcttttgttcagaaggagcaactcagtgttgagcaagaatttatgaagatagtggaggtggagtttttagtctacaccatgaattgagaacagagatctccaattaatttttcactgtatcaagtttctttagcaaacaaatatacttttcaggtatacttggagaatagacatcagtaaggaacctttaaaatactatgtattaaataagtgtaaagaagttctccaaaaagttgtagaaggtacaaaatgaaataatttatcagtcttaatgaactgaagctaaaatcttctagaaaacatggtttgtttgtttgtttgtttgttttttacagctatcttaagcctgttttcacatgtgacttcagttgaagtggcataggtaataactatagggaaataagccattacaaaggactaaaaagttgatgaccaatattccaccctcacccagcaattattgttgactctttataattaaattattagaactttttatttggcactatactactgaaaacattagccactaattagtcacacttccacagaacagatggtggttcagatatcttgaatattacgaaatgcccaagaatagggcagcacaataaacttcaaatctcagtaccagggaggatatttagataactagtatcatggaatctttttctgtaaaaagaaaaaaaaaaacagccattaggttggattaagaacatattagggggtgcagcacaccaacatggcacatgtatacatatgtaacagacctgcacgttgtgcacatgtaccctcaaacttaaagtataataaaaataaagaacatattacgtatgtgctcttaatgtgtgtgtgtgtgtgtgtgtgtgtgtgtgtgtgtatgtatgtaatatgctctcaatccacccattagttgggtttttttaagtaatgacatatatatcattctaaatataccagatgccacattctgaaagataatcttttttaaaaacctttcatttggaatcctgggtgcttccatttttaaatgactgttctctatagaaagagaagtttgcaataacgaaccctgtacactatctgagctgctagtgtcaaagctacagaagtggtttgctggggagaatagcttttctgggttgaacctagttgtcatctatagtcctttttcatttgaaggaacatttaaaacaatacgtccctttttagtaggaatatagttgaaacttcaagattggccaggggtgctaattgcttaagccaaatgttattagaggttcctcatgttattctttttacttttgtatgtgtttaaaatttctcataataaaaagtgttgcttttagcttactttctaaataggttcttcatagattttttttccaggttatgtcttgtagtcgttctaatattctctgattaaatgctttgtcattagtctgagttgcatttatttgctatttctgtatataatcaaattttagatttggagtcagttcagtacaaatagcatactaaaattcagagacactggcaaaaggagaaaattttaaagtccctaaaaatgcatgccttttgtatagaagtttgtgcttataaatacaagcaattaggatgtgcttaatgcagtcaaacatctgtagagagatacaatggtttaattaaataatggtaacagttgctttatggataagaggttttcaccagtctggggaactgccagtatctttagtgggagaggtatatctgcttcagtaaattatgcttccaattagaattctcttttatgggtgaaaatgaggaagaatggagtcatgctgagaagaaggaatgctatcggtgaaggggaaaattgacattaaatttgtgagcagtaaactgtgaccagagcatagggttcatcatgcttgtgagttctggccctggccttgtatcttccattgtgcttccctgaggcatcctgtctgttcatgctactttcccactaacttcagtgaatcccaaattcatgggtctagccacagccagcgtactgaatcccagtgccatattccagaccccaaatatcccatgtgcctctgaacctgcaatcaatgtgtataacactcatgtccttctggaaatttacttgttttacacactctattctgagttctcttggttggcctaaactatccatgatgccttcctctccctcacccattatttcttattagttgcaagttctgtatatttggccttctgtgttcatgtgaaatctctgcacatcccctacttacctgagatcctgtcctctcatcagtgtcattagactcccagccagtcaccctacctcttatctcacattggccccctcccacttcaattcctccttttcggaactatgcaagttcccttaaaaacaaaagacaaaacaaaaaaaacagctgcaggccggcggcagtggatcacctgaggtcaggagttcaagaccagcgtggccaacatggtgaaaccccatctctactaaaaatagaaagattagccaggcatggtggcaggcacctgtaattcccagttactcaggaggctgaggcaggagaatcacttgaactcgggaggcagaggttgcagtgagccaagattgcactattgcactccagcctgggcgtcaagagcaaaactccgtctccaaaaaaaaaaaaaaagaaaaaaaaaaagctgcttgtggtttttccttgcttgaaaagttgcacctttcaagattcaagtaaaatgcccaagtcctataaaccctttctaatttgcatagagaacggagaaaagagctggcatttgagtgacaaccatgtaaccaactaatgagtgcctctttgtgataatgctgatggtcacattctttctttatgaatgttccccgttgaggtacaggaccgccatatagagatgtggcagtggcaggtggtttagggtaagagtggagactgataattttattctacatcccactcaaggagccaagccctctggcattgtgcacacccactggaagtgggctgttcttgcatttcacacaaaggcagcatatgggctagtgaagatactcggaaattcagtgatagcatccccagtttacagttgaagaaattgaactttgaacctaagagagtttgccaacttgcccagcccagatagtaaagtgatgaaagtggggtggaagccaagacctgccagaagtccaaaatctgtgttctttctgctgcctattttcctctctgaagtggaattttcccctacttaacctcaatgtgaaagcactgggtatccacctccaataccatactctaacttggagtaaattatttgtttatatctctactaaccctccatcctgtgaactcttccagatatatgttggtcatccttgcctcctcaagatccagcaaggaccctggtactttttagatattagtaattataaatataaggttgaagccagtccccaggataaaaaggcagatgctccttaacttggactgatgaagtgggctcctccgtaaccctaaagacctgaccaaaactccttccttgacatctagcgtaagcaccacacaaaacaaatttctttcctaggccacagcatcctctaaagctgtgattgatcaagctaactaaatggatgtggttggccaagataacaaagcataaatcagggttctgaggacctttattaataaaattttacaacatggtccttctttgtaccatgaccctctgctatttggtcatctacttgatttaattgtgctgtcctgtttgaccgccaaccacagtctgaagctattcccatgacaaataagtgtgaattttcaagtgtcctgttgtgttataaaaggcccgtgttttattttataatttcatatttttttcattcaattttaattattatgtgcaagttcccaggctcagtcatttattaatgtttttattttttaaaaagttattttcaggcagattatgaagatttcttgcaaagaatggcctcaggcattgtttgtatagagataaaatctcctcttttaaatcactatgtaggtcttcattaatattttttcattcaacaaacgatggaatcattatttcagtgaaactatggctcctcttcagtgttcatattctgctttaattatttattaatccttcaaaagggcagaatcccttcatcctttcaacctttgctttgtcaaattgttacttaaaaatgattggtgttttctttgtcctttgtaatcttccttaaatctctgctaaaaggattctattctactctttgtattggcactgaggttatttatcaaagtgtgcttctctttgcagctacctcaaggctaaaaatgtagctcttttcagagatggctgttttacagaatgctataataaccaatttatgagaaaggcagtaggaaataaagagggaacaaaggcataattgtttcatacccattttttttcttctagcattcaaaattaataaaaacatgaattattataaaccagatgcgggaaagatctctggctgaataaatccatagtgaatggggcaggattgaaagatatggcggggaatcaagaaattcgcaataatgaaaggatgcttattttttattacaattttactgtggcctcttgataaaatgttccactcttcaggaaaaatgcagcatggttatttcaaagacagtgtttccatattctgtttctaataagcctgttgatttgggggtttagtgggtccaaagtagactaggtttaaaatagaatatttatagcacttcccagcccaacaaaatagaaatttaatgttattgagaatttcaagtatccttatgtgtaattgttagtcaaggatgaacatcaaaaaaaaaaaatcataacagcaaatagagagctgtcactttgttcttataagaacataggtgtgactttgtttttcataagaaatgacttttaaatgtatatagatttaatggtttacagctgacttaagtatttggacataagaactttttttttttttttttttttgagatggagtcttgctcagtcacccaggctggagtgcagtggcgtgatctcggctcactgcaacctccgcctcccgggttcaagtgattctcctgcctcagcctcccaagtagctgagactacagacgtgtgccaccacacctggctaatttttttgtatttttagtagagacagggtttcaccatgttggccaagctggtctcgaactcctgatctcaggtggtctgcccatcttggccccccaaaatgctgggaatacaggcgtgagcccccacatctggccaagaacatttatacatattatcaacaaccaaagccttgttcccccattggtttcataatagtctcagagctccttattcatattttccctagtgttattaagtaacagacatgaggcctgtaagtttagctgcctgtgtctaaatgtatatctttgacccaagacaatttctctttcaaaatagaaccactcatttataaatgaaaatgctttgtcaaatgaatggcaaagtacggtatactattaagacagcctcctagttttctgacatttggactgccatgttgaaatgtctccacacagcaagatacaaatgtgtgaatgccagtacacttcataccttaggtccccaactggtctgtctgcagacttgaggttacagacctgcaggtgtcgaactcaccccatagtggtggttagtagagtgctttgtatacgtttagctctctatgccttttttggttgtgatattaggtaagctctctttttcttgctttggagcttaattatggaatctgtaaatatagtgcatatgtcatccagatgatctgtggaagtcattgataatgacctttaaaaattcacatgtaatacagcatccgttttcctgaatgatttttatagttttaccattggcaaacagatactttcttttatgtatttctactccataattttaggaaaaagtaaatccttttagctacattaaaaagaatacactttctaggaataatgaatgtaaaaaaagtttccttttttaaaaaaatattgcgctctctaccattctggcagacaaattgttgaccttaatatgtataattcagtgcagtatattgatcttgtttattgtgctccaaatggacgctggcagaaatttgaggaattaaatatcaaccacagtgttttcttcatgcgattgcaatggtttgttatggattattttgttcagttcaaataaatgatgtacgttcagattctttgcccaattttttaattgggttgtttaccttactttcttaattttatttttatttttatttttatttttatttttggagacagagtcccgctctgtcacccgggctgaagtgaagcggcatgatctcagttcactgcaacctccgccttacggattcaagcgattctcgtgcctcagcctccccagtagttgggattacaggcacatgccaccacatccagctaatttttgtatttttagtagagacagggttttaccatgtttcccaggctggtctcaaactcctgagctcaggcaacctgcccacctcggccttccaaagtgctaggattacaggcgtgagccactgcactcggcctgctgttattattgagttgtaagaatttttatatattctggatactattaaattcttatcaaatacattatttggaaatattttacccattctgtaggttgtattttcacttccttaataggatccttttgacacacaaaaattttcaatttagaagtctattttatcagttttttcttttgtggcagttactatggtatggtatctaggaaaccattgtccgaaacaaggttacaacgatttatacctgttaccttctaagagttttgtagttttagctcttacagttaaatctttgattcattttaattttcatatatggtgtgaggtagaggtttgactttattcttttgcatataaatatccagtgtcccagcaccatttgttgaaaaagactattcttgccaggtgcagtggctcatgcctgtaattccagcattttgggaggccaaggtgggcagatgacttgagcccagaagttcaagaccagaatgggaaacatggcaagaccacatttctacaaaaaaattatccaggcatgataacatctatttgtagtcccagctactcaggaggctgtggtgggaggatctcctgagcctggggtggctgaggctgcagtgagccttgatcacgccacctgggcaatagagcaagaccctgtctcaaaaaaaggaagaaaaagactattatttcccccattgaatggtcttggcactattacacaaaatcaattgtccatagataatatgggtttatttcttaattcttagttcttttctttgatctgtgtgcctgtgcttactgtagtaccacactgttttgattattgtagctttgtagtaaattttgaaatcagcaagtgtgagtccgttatctttgttcttctttttcaatattactttgagtatccggagtctcttgcattacaacatgaattttaagatcttcctcaccccctgcccccactaccatttctgcaaaaaaaaaaaaaaaaaaaaaagtgcggattgcattggatctgtagatcattttggggaatatttatatataatgttaatgaggttttaaacaacacttttatctactagaactgatatttgcctcgaaatgattccaccttgagccccattcaggaacgttagtattttagaagtagcaagagaactgatttagcatgctatcatcttttactccaaattttggtgagattccagagaaattatttgtgagcttttccttaagccatgatgactgacatgtcagtagtttttgtctgtttttatgccattcttttatttttgtgcatgtgtgggcacctcaaccaaatggatggagcctgaggcatggtctcccacgccaaagtctgccgtttcttttgatgatccaatgcagttccaaagctattttctcaactcaccagctcgtttgtatggccctgtaatttgaaacaaaatctaaaaagaaatccaaattaaaatgattgggaagtgaagtcagaccacagtggtggctgtggaactacttcctggcatggaacactagagcagatgtgtcctgctttttttgtagagtcttgggaacaaccaatgattttagactggaacaagggctggttattctgtttttcacaagcatctgccttcaaggttcattttttaaaagaggaggggaaaaaaatcagtgatgtttgccaccctgagtatggagatgaatccaaattgagattaattttgaaatatgtttcccgaattttgagattaattttgaaatatgtttccacaaacactaactgggaatgacatgagtttgtttcatgtgagacggagtttggaagacatgttaatttgcttgttggtgttcaactcagaaacaaattttgcatgtattttctgagtaagtgccattattagttaacagttttcctgccgtatgcactatgggctgctttagaaagtaaatcatagaaggttagttataatatctcatcaaaaatagtggatccatctattaaccggttccaagttatgagacgtgtccaaaggaatgttgacttggtgtgcacctaaacactatttgtgaagaggctttggacttcgagcatgaaacggggtcagagggtcaaggccagggcgttacttaatttcagctcctgttgatggattcattgacttcagatagtgcgtttaaaaaagcctgtttaatgtgtttgtcttttgataattattatgtatttacatatgctcctaaaagcatgagttaaatcttatttctttgaaacagtgcttggcaacaacttgtattgtcttgtacatgccttttgtgtctttgcttttggttgggggggggcattgaaatttgtctgcccatcccctgagggcagatactgaggtgtggacctatgtcttcagcttcctgtatagcattgaagttgctatagctgcatgttctctaaaatttttatacatgcgatttaattgttaaagcttatgatttttaagtatagtattctgatagcaaatagattttgtcaaataaaaactaactttatcatcaccactgagatatcactaggtatatggcttagttctcagtcaccacttttatttgtaaggaagtcttagaagttttcacaagtgtatatgtgatagactgggcacagtggctcacgcctgtaatcccagcactttgggaggccgagtcaggcaggagttcgagaccagcctggccaacatggcaaaaccctgtctctactaaaaataaaaaaattagccgggcatggtggcacatgcctgtaatcccagctactcgggaggctgaggttggagaattgaacctaggaggcagaggctgtagtgagctgagatcctgccacttcaccctagccagggcaacagaacgagactccatctcaaaagagaaaaaaaaaaaaaagctgggtgcggtgctcacgcctgtaatcccagcactttgggaggccgaggtgggcagatcacctgaggtcaggagttcgagatcagcctcaacatggagaaaccccgtctctactaaaaatacaaaattatccaggcgtggtggtgcatgcctgtaatcccagctacttaggaggctgaggcaggagaattgcttgaacctgggaggcagaggttgtggtgagctgagatcgcgccattgcagtccagcctgggcaacaagagcgaaactccatctcaaaaaaaaagaagtatatatatgatgcttgctttagcagcacatatactaaaattagaatgattaaagagattaacctggcccctgcacaaggatgacatgcaaattttgtaaagtgttttatatggaactttacttacatgaggtacctagggtagtaaattcatagatacagaaagtagaatgctgattgccaggggctgagaggatgagggactgtggagttagtgtttaaagggcacagaggttcaatttggcaatattgaaaatagttcagtggggaagatggatggccgtgatgcatcgtccatcacattgcacagcatcgtgaaatatacttaataccctgagcgttacacttaaaatggttaaaacagtaagatttatgttatatatatttaccatgataggatatatatatgtatattcatatcattcgccattgtgaatagcaaggagattgaagaaataaggacacaggatcttcaataaatatgtattaaatgcttcccatgttccacattctttgtcattgccagacacgtcacaggtataagggcccaatctttgttactcaaataatttagaataatttagaatttgcttggggagactttggataaacagttaagaagctgtatccattaggtaaagggacattgcttgctgcgtctcgtagcatttggtagtctcgttagacagccgttcttactcctatcgtttgctgaaatttattagcaaaggaaagaatcttagttttcagctcgttcagccgcatgatttcataggctcaggaaaaccatgtaatatgcccaaggtcagacgtgatgaataagactaaagactgaatctattccagtgtctctgtgtccagtgatacttacttactgctgttgccaagttaaacaaaactgggtttgcagagctgtttattcaccttcagcatcttttcattgaaaatgcggtagatagaagaaatgtccctcttttagcatttgtacctcagtaataagatgcttcccaagctcaaagactccacacccttaaatatgtaagtcagtgttaagatatttaaagagaacatgaatatcagctacattgtgcatgttgcaggatttttatattattttgtatcttctgcttagaagtcataagccagcccatgaaccatgccaacaaacataccttcttccatgtgattattgcagccagatttttcagtgcaggacaagcaaagttttctctgaaagcatgagataataattctcagccaggtcttcgccatttgcaagggatcagacataagagtttttagctctgttgatgttaatagctagagcccctgttagcagatggcatgttagtggcctgttgctgctggctattaaatcatacacattggccaggcacggtcggtcacaccagtaatcccagcactttgggaggctgaggcgcacagatcacaaggtcaggagtttgagagcagcctgaccaacatggtgaaaccccatctctactaaaaataaaaaactaggcaggcatggcggcacatgcctataatcccagctactcaggaggctgaagcaggagaatcacttgagcccgggaggcgaaggttgcagtgagccgagatcacgccactgcactccagcctgggcgacagagcgagactccgtctcaaaaataaataaataaaaatattaaaagtaaatgatacacatcatgagatcatctcccaaggcagcagagaattttgcgtatttttttcttagtttatattgttgcaacagagtaattcttcttgatcacagactttgctttttttgttgttattgtttctaagtttcacttgatcctcaaaataacctgagacagacaaaacagataggttttcccattaatctccttcatgagtctgactttgccagccaggctgatcttatatccatagccctggatgcatttatttatgttattccatctgcctataatgcccatccccaatcttggcctattacatgtgtctaacattactttgatgtgtacatgtcagtgaattaccacttaactgattgttagctttttgagagtatgtatcaaatctcatgtgcatttgtgtgtcctgaaacaaattattaggtataaagtatgtattgcaaataccatgcccagggaatatttcagagctgtggttctccaagtgtggtccttagtctagcaacatcagcatcgcctggcatcacctgggaacttgttggaaaagcacattccatgatcccacccctgacctcctgaatcagcaaagctagggatggggctgagcaatctgtattttatcaagctgtccaggtgacattgataaatgctaaactttgcgaattactgatttagagactaatcaactcattaaaaagttaataaataggtgagaatccattgtagcaccccagtcacctatgctattatcttctaaattcacattatacaaattgtatgccacaaaaatgtttaaggtgaaaacccaaaggaattgatgcattggattaattcacaaaaatttaacagctgcaattcatagaaaaaaaatgcatgcatatctgataattagttgtagattaaaaggtgaacaacttcttattattaataccaatgaaaatgtaattttttaaaaattatggccaattggtagttttttaaaaatctgttatgccttgtcatgataaggataggtgaaaaggaactttcataaactattgctaagtatatgggtgaaaccttttagactatttgggtctacctaataaattaaaatgttcagtcttttctaattttagcaccgtatttctacagatacactggcatatctgtggagaggggcacttctgcttgtcacctgatatcccttactactactaatatttttataagcattattacctttaaaatcatgttaaagggtaaatgatgtgcaacagactcagtttccccttctctgactcctgtttagtttacatctcttttctctctctcatttgggggctcaatacccttaagattatagagaaattgcagtaggtaatgttggctggaaatgctaacttgtaagaaacttgggtggaaatggtttaagccatcagcctaaacgatcagtgaaaatgtcagacattctccgctttcttcttccaagatactatactctactgtggccttagagttcttaattcctatataattctgattaaaaaggaaggagatgctcctaatataccttgctgttgtcccctcctgttcattagggtagctgatgtcagtcaaaataaagtctagaaattcttgagtactttttttttttgtaatatactgagaatgcttgaagcaaactaaccaaatttaagtgttttaaggatattaacagtaacaggagagcccctcgattttctgctaagaatcaacctgaacagtttccagactgctggttggcaatgtcagtatcatgagaaaaactgaaaaaataagaaactttagagaaaaagaggaatcagtgcaggctaggggaatgaacttggtaatccagtagtctttccctgccagcattttgattgataagctaagtgtctgctttttctcatcccttattttttggcaggaaaccagtattttgatacttgaatgccttctttctatcttaagggagaagccttcttaaacttcaagtgtgaagtagatcctttaggtataggatgaaaaattaagtgggactatttgtgaattactaaatcgcaaccattaaagaaactaatgccctaattagcctgtcttttgacagacatggcatccatatgtaagtctaatattgtatgcaaatgtgagacaggttttgctttctagatctctttgatgtgaaaggaaaagctggcttcctggcttccttcccatgttctgtatggacctgccttcatcctgctgccaacagctcctcaagggaacatgaaagtggaattaaaccctcctggttttcagattcagaatcctgggtgattaagtggcttgatcaaaatcagaaactgtgaaagtgctaaaaatggtcaaggcccaaggagttcctcatgtgtggtcaaaagcctttcagaaatcaaagtgtgtctttaaatacctggggtgcaaaaatcagatgttttttatttaaagaaaaataggtatattagagcagaactgggggccctctgtaggagcctgagtctgggtgtttactgtcgtctaaggccttgttaatgtgggcttgaggcttcggaatccacgaacaggggaagctagcgtctctcgctgactccagtcctagctcgagctttccatactgccctacgtgacttctgcacttttgtgccatcagccagtagactgagaaaagtatctggtatttgtcggtgtcttcggtttagctgctttaagtccttggatggaaaaggctgattgtcatcctgaaatcattgtctcctaatgtgtaattggggccaagtgaagcacagtaatttagaggaattctagttaaaaatacagattcttgggctctacctcagacctacagagatctgcatttttcttattcccccaggtgatcctttaaacattcagaggtttttaaaactcatgcttatatgcaataacaaaaatataaggattcttagaaacttgttatatttgtcttgaacatgggatgacagacattgtcattttcattgaaaaaaaaaatgaagcagagactcagaatgtatttagagacaactctaaatacattctggcagagcctaactactggattgcagagatcctccctgcttcccccagtccccatctataaactggccatgtgaatttctagtggtgttcacttccaaagtggtgattttataaaatattacaatgaagcattattaacctcaagaagttcagatgcatagagagtttatttgggtgtggcagcattagtggctaggttttatttatccaagataagacttcttattagctatgaaaagggattggcataaactgcttattaatgtccattaactgtatctaaagggaataaacagtataaaaggccaggcatggtggctcacacctgtaatcctagccctatgggaggctgaggcaggaggatcatttgagcccaggagtttaagaccagcctgggcaacatggggagaccctgtttctacaaaaagtcaaaaaaataataagctgggtttaggggtacacacctgtaatcccagctagtcaggaggctgtggttggaggatcacttgagcccaggagttggaggttgcagtgaggcctggcggcaccactacactccaggctgggtgacagagggacgaccttatctcaaaacaaacaaaaacaaaaaactgtataagcataagatgggcttgagtcacaaaattctgcctttcataactttcccccatttgctgtttgatttgctgtttcagaaattgtgaacctacttctctacttatagaacatttacctccctcttagattcttccctttctatcattgatactgacattctgcttaaagaattatccatttaggctctcttcaaatccaaagtgatattattttattttaataagagatgaaagggaaaattgacaaaatgtgcctggagttgtcagcattgtaaatgatggactgtaaaagcttcgtcttggaagattgtcagagagcctagtgccagctcaaaaagtgtggtctttttagagaattgacagaaatgttacaaagaaaacatgtgctgaataccaactccaggtgcgaatcctgagaagcaactcactctattctgcagtaggagatgaattttgcaggttatacagcagagcaatttaaactcccttgtttcttaaagtatatcctatagtgacttgggatggaagtcatatactatccccttttttgttccttcaaagtaaatacaccacagagctggagatgtcccagacacagggggaagctgtttggatttttcccactgcctgtaatgaagcaagatagggaggaagaacttgggaacttgcgtggcaaatggtcaagtaaagaaaaagaaaagctttttctttacttgaccatttgtcacatgtgctttcaaatcctgaactgagtcacatctgaaataaatcacttccttgtcatttccatgaaaggggcagtacaagaaattccttgcacatccctggtgagccccttgttactctcagattcagctattgccttcaggaaaaaaagaaaaagaagccgaagaaagaaagaaaacagaatcctctagaaaaagctattctgacctgtgctctttcttttgtctgagtgtgactagataaatgcattagtctgctagggctgccataacaaaataccaaaataccacagactgaatccttcaacaacagaaattatttttctcatgcttctggaggctggaagtccaagatcaaggtaccagcaggtcggtttctgaggaggcctctcttccttgatttacaaatggccacctacgcatcatgtcctcacatggtctttctcagagagaaagagaggtgtctcttcctcttcttcttttgttttgttgagacagagtttcgctcttgttgcccaggctggagtgcaatggcacgatcttggctcactgcaacctccacctcctgggttcaagcgattctcgtgcctcagcctcccgagtagctgagattacaggcatgcctggctaattttgtatttttagtagagacagggtttctccatgttggtcaggctggtctcgaactctcgacctcaggtgatccacctgccttgccctcccaaagttctgggattacaggcgtgagccccgcacccggcctcctccttttcttataaggacacctgtcctattggatcagagtcacacccccatgacctcatttaaccttaattatctctttaaaggtctgatctccaaaggtcccttgagggttagggctttgatacatgaattttcaggggcacacagttcgatccatagcagttggcttattcatactttgggtagatcctcttcatcgttcctcagctactgtctatttagtgcacagcttctttatcctaaagctagtcaggggaggcatggaaggtattatttctcctgtttctgcacctaaggcattaaaacgaggttgtggtctggcagcctaaactcggccttgatgaacttcaaatcctagacctccttggtatgtgaagtgcatacacttgtatggagggatttgacaggttttttttttttttttttttttgagacagagtctcactctgttgcccaggctggaatgcagtggcacgatctcggctcactacagcctccgcctcccggtttcaaatgattctcctgcctcagcctcctgagtagctgggattataggcgcgcaccaccacacccagctaatttttgtatttttagtagagacggggtttcagtatgttgatcgggctggtctcgaattcctgaccttgtaatccactcgcctcggcctcgcaaagtgttgggattacaggtgtgagccaccgcgcccagcccagatttttttaaattagtttttagtgtatccacactgttaaagcaggtggatactgctggatagtataacaaagtatagtgtgacaaacccataaccaagcattgttagctatattttctcatgtcttgagccaaaaggtcacagttaacctaatgttgctactaaacactcataccataaaacattctattccagtcttccagattttacacaagaataaaatgaaaacttttagactactggagatttttttttaaatacacaatttgttgaatgtgaacgctaaattgaaattgacatgctaagttttatagattacttcagctgccctgacttcagtaaatttagttgtgacacaggtacaacagctgacttctttctggcattagaggtggtgatgtttcgtcactctggagttagtaaaacctgaaacccgccaggcatttgacacacagtttgctgccagggacagctcagcttctggcttattggagaggaaatgacctaacctctgtgtttacaaagtgtttgaaactgaggcccttccacttccttgctgagtgtaagggttgacctggcatccaaaatccccatgatcttctcaggataagtcatgcagccattggtggtcaagaaaggatttgttccctgtggaagggcattggaagaggaacagagctgaaacacacgggtgttcagagggaaaacatctctgcacttaagagggctagattagactattagactattatcatagagctcgtgattcatctcctttgtttaattccagccttgagtaaaggactcactaagaaaccacattcggccgggtgttgtggctcacgcctgtaatcccaacactttgggagaccgaggcagatggatcacaaggtcaggagttcaagaccagcctggccaatatggtgaaaccccgtctcaactaaaaatacaaaaattagtcggggatggttgcgggcgcctgtagtctcagctactcgggaggctgaggcaggagaattgcttgaacctgggaggaagaggttacagtgagccgagatcacgctactgcattccagcctggtgactggagcgagactccatctcaaaaaaaaagaaaccacattctattccagtatatttattataaccagaaattcttgtcttatcagcaaatagctaatattcacttacatgggcagtgtattagattcctagggctgctggaaccagttaccacaaaccgcatggccgaaaccaacagaaatatactctcattatctcattattctagaggttagaagtcctaaagcaaggtgttgccagggccacactgcctcttacagctctaggggagaatctgtttcatgcctttcgcttgctctagtgctgctgccagcccttgatattcctttggttggtacatgcacccctccaatctccacctctgtcttcacatggtgttactccccatgtctctgtttctgtgtcttctctaatatgattaagggcccacccttctccattgtgacctcatcttatatctgcaaagaccctgtttccaagtaaggctgtattcttaggtgtaggcattaggacttcaacatatattttgggggaaaattcaacccataatgcggttatgtttttattttccttgacttttaagaatgtgaactattgtcaaattttttcaaccactatcaaatttaaatctaagaactacatgtcttaaatttatgacctcttcattaaaaaaaaaataataacatttaattggtaccaaaacgtgaaagagtttaatgctttgcatttgcttgaggctgattaatgagtaaatgtgtcaactgtggctgttttaattagccagggttaattaatgtttaccacacttggaagatgaaaaggcatgtataaatgctctataatgtgaatcattttttaatttgttgttgaagcttatagtgtagccaagtaaggattgcttacatcatacttacaaagggaggttcattaatggatacaaatacacagtttgatagaagaagcaagacctagtatttaattatcagcaaggtgactaatttacagtaatctactgtatatttaaaaatagctaggagaacctaatttgaaagtttctagcgtaaagaagacaggctgggcacgatggcttacacctatagtcccagcacttgggaaggccgaggtgggaaaatcacttgaccccagcaattcaagactagccagggcatcatagtgagaccccatctctacaaaacaaatatttaaaaattagccaggtgtgatggtgcatgcctgtagacccagctgctctggaggctgaggtgagaagatcacttgagcccagcagttcaaggttcaagtgagctatgatcacatcactgcactccagcctgagtgacagagagagacccttcctcaaagcaaaaagaaaagaaaaacatttaagtgatggatatcccattatactgatttgatctttccaaattatatgaatatattaagttttctcatataatctgaaaatatgcacatctattatgtatcaataaaaaataaaattttaaaaatgtaaaaaacgatgttggagcactatggtacttaacgtagaggctctgacttttgaggtacattcattacctgttactgaagttgagtatgctttaatattgtatgtttagaaaaggtagttacatttttaaatctgattgtgtaagaagaaaagagtagaaatgtttggggccaagtcaataattatttagtatatcataatttgagatgaaatgtgtttttttttttcttttttagtttcaagttgaaacattttaagaacagataaggaaaggctaactgtgctgagatgaaaataacatttttaaagtaactatcttaaagaaaatacatttctagaattttgtgtaaattttcaacaaagactcagaagcctggatgaggtcttgtgccaagactggaaagtgtggggattagaaaaagtttgaagagattgttgtgagatcctctcgtatgaggcctgaagctgtacatccatggaaagcagttaccccaggcgggaaaacaggttatccattctcgagtgagtggccgggtgggaaatagtccatcatgtcgaatggatcgtactttccagcaccaagatttgtggttctctaggtgaataagatgacaccccttcacttcacttcacttcaccattgtctgcatggagtacgtatctaaaaacaaattagcaaaaaggttgggtctactttacttttcatctcctacactattttcttctttgttctcggcaggaaaagatgaagttgcattttattattatctcataggattcttattctaaaatgatttgatttaaaacccattgcactttatttggataaaaaatgcttcactctctagttcttaacaataacaccagcctgattttattacgttaagcactgcaattagacaatacaaagaatttgcagcaacaacatgttattttatcatgggtggaactgttcattgtctagcagaatttattaccagataaatcccttttggggaatctaatgtggatgtttttttcaaagcgcctgtggagttctgctagtattgggaacgtttccattttcattctgatgcttccctgtgggctgtttcagcatagaagtgagctctctgggtccatgtttccattggctccacccaatattctgaaagattgcaactcaacatgtgtaaacagaacctttctcccccatattttctcttttcgtagattaaactcaggtcaagaattagaagtttatcctccaccccgatagcatctcgccctatcccaaataccgccaccaaaatgcccactgtttttccttgggccagttcctgaaatatctttctggctgtatcactcttgtgtgcatccttatcggctatgcttttggccattttttactgctgacttgtctggttagtcttttataatctccaggcttctcctccatcctttttttacagtttacctgttcatgaagcgcaggtcacttgacccgtagaattcccataggctgggattttgctaattgcatactcatggtataggtcagtgtattcctctgccctctgtatcccacaaactgaaagcctcttggctaagctgcttcccttttcacttcccttgtaccacagcagccagaagagtcacagatcctgggcagcttgtcctctgtgcctcggtacatgcacttgtatctgctaggacaatgatctctttccctggggccccactgtaatatcactagtcacatccctaaagcccaggcttgtttctttgtcattctgtcggtatccctaccataacacttgtaatagtaattatttttatgcccatcttttcttctgaaccatgagcccttcaagtgaaaagaaattgatgaagttatttctagcactcccctggaaaaaggaaggcaggcagggagggaggggctcactagtttatgataaagtggtttgattttcttggttgcagattatttcttttaaagtgactcttttcagcttctctcactcctgtgcatcgtgaatgctctcctgaagacagacgctttccattcatttccaagccccccatgtgaagtgctttctgttgccaggcttggtttccccacacgttgttaaagaagttaaagaagcttgtgaataagctaaagcagaggagaaagaaccattgctatatctagaattgttcaccagaaagcaagttttgtgttaaagaaaacacgagtaggccactgtgcagaagtgcttacagggtttgtgtgctttttaaaatctgcataaataaacatttcaaatgagctatcatatatacaaggatgatgtgctgtctgtgggaaaaggacccaatcctgtgttgtgattttacatatatatatatatataatttgtgctattacacacttgcctgatccccttataattatctgcataagtctttttaggctctttgaatgaaattcactatgtatggatgttgaaaatcatcctttctaccatgagctcatcagacttgctaaccaattctttgcatcctttgaagtataaaattccatcaattcagcatgtatcaacatgaatcaattagaatgcactttcttcacagcatggcggagtttttgctggctgccgggaggggcactgtttcccaattcattcatttgcttgggcccgccccaggatccttcttatcccggtcagatagacttctctcatgagcttgagagacggggctggtcacacaggacacggctttagggacacgactcactgaaactacaaaatgagtgctgctcttagagttgtacccacagcctgcacagctgttatggcaatgctgtgggcaagtcttgctacggcccattctcctccctcccttgtcctgttggaaggttcaggttggagctgaaattcagtccagcacgcagctggacaagccatgtctcctgtatgtgactcactccccagagaaagcatcatgtggactagtaagggcttggctttatcagaagcaaaggagaggtttacatctcttcttgctctctcttagtgggttcagagctccagcagaaaaaatgggacactgtggattgatctccagaaaaccccaaaaccagcactgaaggctccaggagattatgcctttagattgtatacaggcaccagaatgacttttgcctttataaaaatgcgtgcaagagcatgaaaactaatatttgaggaatttttttttctcactgtactttctggtcctcactgaaagcattggcagttttaaaaaatgaaatgtgatactgttatagacgtagcaaacctcacgtttcattttttccaattcattctatatctaggaacttacttagaaggagaaacaaactgtacccagaaaaaggaatgaaactggagaattcttcctcatgattcctctgtgtcctcaggcctaattatcctcattccaaagactctccattgcctcaataacttcgaaaaatttactctccttaagcatagtcataaaaattgcatagtaaagtgataaagagacgaaaataatgctgtaagaataaaaccattaaaaaaaaaccactactcttgattatttctgctgttagaattgtaaatgaattctcattccttttttctacatttttggcatgaaatttatgttactcttataattagtaaaaacattatattttattaataaaagaagactcacagtgaagtcataacatatgctgcagaggttagactcttcaagtcagatttgaagagagaatttcacgtaacaatcaccttgaaatgtcttcaggtcagccatcaaagtacacatctctcaaccagccaggcagccagtttttcctccagcatgtgaagagtgaagagatagctgtttcttggcttaaagaccatatgaaataattgacttatgtttaaaagatatgagggatcaggccgggtgcagtggctcatgcctgtaatcccagcactttgggaggccgaggcgggtggatcacaaggttagaagatcgagaccatcccggccaacatggtgaaaccctgtctctactaaaaatacaaaaactagccgggcgtagtgatgcgcgcctgtaatcccagctactcaggaggccgaggttgccatgagccgagattacgcctctgcagtccaacctggtgacagagcaagactctgtctccagttaaaaaaaaaaaaaaggcatcaaaattacattcacttctatttttatttttgtttgtagaagacatgcagtttgtatcacattaatgggcatatgatgtaatttcactataaatcgaaccagaggaagacatccaaatatgtataaattaaagctgacaatgcctacagtactaaactttttgttttagtataattggagacttagaaaagttctaaaaatatatttaaaaatttttaaaggaagttgcagacataatggccctttacacctaaatacttcactgtacgtttcctcaaaacaagaagatatgtgtgtgtgtgtttgtgtgtgtgtgttgtaatcttaatacagcatctttcagagattatttctgtagtatataaacttggtttttttgtttgtttgtttgtttgtttgtttgttttgagatggagtctcgctctgtcgcccaggctggagtgcagtggcacaatcttggctcgctgcaagctccgcctcccaggttcacaccattctcctgcctcagcctcctgagtagctgggactacaggcgcctgcaccatgcccggctaatttttgtatttttagtagagacgcgatttcacctcgttagccaggatggtgtcgatctcctgacctcgtgaaccgcccacctcagcctcccaaaatgctgggattacaggcgtgagccaccgcgcctggccataaagttgttttttagtctctactttaagttcctgacaacccaggcaggaccaagactccctaatgtagttggaaatcagatcagcacattggcacaagttctacaggtaaacgggaaaaaggagccctacaatctgcttttagatgccagggagcctggctggtctttatcttgattactgactgatgccactggtaggtctaagttctttgatctatgatgtttgaaagccaaaaggaaatgtgttttaaaggaaaagggacttcttctgtaccctcagtctaagccagacaagtgatatttcaggaaaatgtccctagcaataaggaatattttcacaaatgatgtgaagctttgtttgtgtcccttccagggcagtttgttaccataaggggacaaagcatgcttcatttaaacatgtgtggccaggaaactgttatttttaaacaaaaataaaccccgatttagacatgtagtctgagttttaactctgggagattttcaagattgatagtgtagctaaaaataactgacctaattttctggaggtcaagataaaaactggatttgtggtacagcatttactttgtgataatatgtgtataaattcttccccaagttggaaaatgtggccgcgtcatacagggctgtatctctcttgaccattgaagtgcctaggtcgctacactacaatttgacttagagttggtgaaacttctggccattcacgtagccatcgtattcatcctgagaaagggaaacctaaagacttgggagagtgttctgggaggaaagtgctattgagaatgggctgtccaagcaaagtgacaggcaggcctcacttagctagaagagggagcttttcagccctgctccaccatcaggaatctccgtgaccttggactactgctttaatctcttttatcctggcttctaaaagataccgtcgaattcattctttttcaaacctatcaaaaatttgaaatgtatgaaaaagagggtgcttgtgatgatagatgggtttatgcttccttttttttttttttttttttttttttgagacggagtctcactctgttgcccagactggagtgcagtggcgcgatctcggctcactgcaagctccgcctccggggttcacaccattctcctgcctcagcctcccgagtagctgggactacagtgccaccaccacatctggctaattttttttgtattttcagtaaagatggggtttcaccatgttagccaggatgctctcgatctcctgacctcatgattccaaagtgctgggattacaggcgtgatatgcttctttaatattagtttctaatccaagtaatatagccatgtcctctataaaatggaacttttcatggaacagtgagaaggttgcattaggaattgggatacttgggttcagatttcagttctgccacttgctagttttaagtatacttctcaggatggatgtcagtttgttcaactgtcagtgggagtagtgatcccactaaggaagattattgtggttatcaaatcagcagatgggtatgaaaaggccatgagtgcagttctcatggttatgaaggtgtcataactggcatagtcccatcacagtatggctttggcatcgcagatggctgtagcatatatgctaatcagaacatccctaccgtccttaaagatctcatgggttctctcccaaatcagctgctccaccgacctacaagtaagtccatgcttctttagtatatttactcactagtgaaggcccgtctgctaaaagtgtcttcagtaggggagagctgctcttttctgggaaacccagcaatgaagtttgtcctgtgatgccctctacacttactgacctgtttcctgagaacttcccgtaacaaatggtccagggaagaaggaagtctgtgaccagtctttcctttcctgtggctttctggttcagaaatgtgaccctgatgataagaaacttcaaggcatgactctggtgttttggcaatattcccctggcagtattgtttcttggctcacactcatctcatgccttgctttgtttgctttgtttttgagaattgtttttttgtttgttgtttgtttttggttttggcttgtgagacagagccttgctctgttgcccaggatggcgtgcagttggcacaatctcggctcactgcagcctccacctcccgggttcaagcaattctcctgcctcagcctcctgaataatggggattacaggcacacaccaccgtgcctggctaatttttgtatttttttagtagagacgggtttcaccatgttggccaggctggtcttgaactcctgacctcaagtgaaccacccacctcggcctcccaaagtgctggggttacaggcgtgagccaccacgcccagccattatgtttgtttttctttcatgaagggataaccgaggctgttgtgtggtggtgtcttggtacagctcgtggctgtggtcagtgtggtggagggtaggtcttctcagatggtaacatgcatgagagtcacctggggatcacattaacatgcagattctgattccctggatctgggtgggacctgaggttctgcatgtctaacaaactcccagagaacacccatgtagcaagagtacagacaaaaggattcaaagcgaagggactgcaagaaccatggaaccagcctcccacgattttgcggatgacgaacccgagccttggggagtttcagaggccatggagagatgaagtataataaacagcatagcagttgtatgttgagccaagaatcagacatgcacagaactgctgattggaaaattaaatctgtttctcatagccctggtgtggcaaaatgcctagctggaagtgggtgaccgcttgatttacagtgggcctcctgggtagggaaaattagtccatcccatttacagctacttccaatgcagctgtgtcaggggagagagaagaaaggacatggaagagagcgtagaggtatgatcttcagtcctttcaggcaggcacataagtaaatttttatttaaaagataagaattggtcatatgcgaatctcctgttagataagattaaaaacaaatttccattttgtggagaagttgcagataaatatttttccatgggatccaaaagaatcaaaaaggaaagaaaatagtaatagcagtggaggttcgatcctagacagaagaaaatccagcaagccgagggacttcatattctcactggtgtccaaatcagagctttttttttttttctttgtttactttaagttctgggatacatgtgctgagcatgcaggtttgttacataggtatacatgtgccttggtggtttgctgcacccatcaacccgtcatctaggttttaactccgcatgcattaggtatttgtcctaatgctctccctcccctttcaccccacccctggacaggccctggtgtatgatgtccccctccctgtgtccatgtgttctcattgttcagctcccacttatgagtgagaacatgagtgtttgggtttctggtcctatgttagtttgctgaggatgatggcctccagcttcatccatggccctgcaaaggacatgaactcaacctttttttttttccttttttttttttttttgtatttgcaaattcaaatctttttttttttttattatactttaagttttagggtacatgtgacattgtgcagcttagttacatatgtatacatgtgccatgctggcgctgcacccactaactcgtcatctagcattaggtatatctcccaatgctatccctcccccctccccccaccccaccacagtccccagagtgtgatattccccttcctgtgtccatgtgatctccattgttcaattcccacctatgagtgagaatatgcggtgtttggttttttgttcttgcgatagtttactgagaatgatggtttccagtttcatccatgtccctacaaaggacatgaactcatcattttttatggctgcatagtattccatggtgtatatgtgccacattttcttaatccagtctatcattgttggacatttgggttggttccaagtctttgctattgtgaataatgccgcaataaacatacgtgtgcatgtgtctttatagcagcatgatttatagtcctttgggtatatacccagtaatgggatggctgggtcaaatggtatttctagttctagatccctgaggaattgcgacactgacttccacaatggttgaactagtttacagtcccaccaacagtgtaaaagtgttcctatttctccacatcctctccagcacctgttgtttcctgactttttaatgatcgccattctaactggtgtgagatgatatctcatagtggttttgatttgcatttctctgatggccagtgatggtgagcattttttcatgtgttttttggctgcataaatgtcttcttttgagaagtgtctgttcatgtcctttgcccactttttgatggggttgtttgtttttttcttgtaaatttgtttgagttcattgtagattctggatattagccctttgtcagatgagtaggttgcgaaaattttctcccatgttgtaggttgcctgttcactctgatggtagtttcttttgctgtgcagaagctctttagtttaattagatcccatttgtccattttggcttttgttgccattgcttttggtgttttggacgtgaagtccttgcccacgcctatgtcctgaatggtaatgcctaggttttcttctagggtttttatggttttaggtctaacgtttaaatctttaatccatcttgaattgatttttgtataaggtgtaaggaagggatccagtttcagctttctacatatggctagccagttttcccagcaccatttattaaatagggaatcctttccccattgcttgtttttctcaggtttgtcaaagatcagatagttgtaggtatgcggcgttatttctgagggctctgttctgttccattgatctatatctctgttttggtaccagtaccatgctgtttcggttactgtagccttgtagtatagtttgaagtcaggtagtgtgatgcctccagcttcgttcttttggcttaggattgacttggcgatgcgggctcttttttggttccatatgaactttaaagtagttttttccaattctgtgaagaaagtcattggtagcttgatggggatggcattgaatctgtaaattaccttgggcagtatggccattttcacgatattgattcttcctacccatgagcatggaatgttcttccatttgtttgtgtcctcttttatttccttgagcagttggtttgtagttctcctttaagaggtccttcacatcccttgtaagttggattcctaggtattttattctctttgaagcaattgtgaatgggagttcactcatgatttggctctctgtttgtctgttgttggtgtataagaatgcttgtgatttttgtacattgattttgtatcctgagactttgctgaagttgcgtatcagcttaaggagattttgggctgagacaatggggttttctagataaacaatcatgtcgtctgcaaacagggacaatttgacttcctcttttcctaattgaataccttttatttccttctcctgcctgattgccctggccagaacttccaacactatgttgaataggagcggtgagagagggcatccctgtcttgtgccagttttcaaagggaatgcttccagtttttgcccattcagtatgatattggctgtgggtttgtcatagatagctcttattattttgaaatacgtcccatcaatacctaatttattgagagtttttagcatgaagggttgttgaattttgtcaaaggctttttctgcatctattgagataatcatgtggtttttgtctttggctctgtttatatgctggattacctttattgatttgcgtatattgaaccaagccttgcatcccagggatgaagcccacttgatcatggtggataagctttttgatgtgctgctggattcggtttgccagtattttattgaggatttttgcatcaatgttcatcaaggatattggtctaaaattctctttttttggttgtgtctctgcccggctttggtatcagaatgatgctggcctcataaaatgagttagggaggattccctctttttctattgattggaatagtttcagaaggaatggtaccagttcctccttgtacctctggtagaattcggctgtgaaccatctggtcctggactctttttggttggtaaactattgattattgccacaatttcagctcctgttattggtctattcagagattcaacttcttcctggtttagtcttgggagagtgtatgtgtcgaggaatgtatccatttcttctagattttctagtttatttgtgtagaggtttttgtagtattctctgatggtagtttgtatttctgtgggatcggtggtgatatcccctttatcattttttatcgtgtctatttgattctcctctttttctttattagtcttgctagcggtctatcaattttgttgatcctttcaaaaaaccagctcctggattcattgatttttttgaagggttttttgtgtctctatttccttcagttctgctctgattttagttatttcttgccttctgctagcttttgaatgtgtttgctcttgcttttctagttcttttaattgtgatgttagggtgtcaattttggatctttcctgctttctcttgtgggcatttagtgctataaatttccctctacacactgctttgaatgcgtcccagagattctggtatgttgtgtctttgttctcgttggtttcaaagaacatctttatttctgccttcatttcgttatgtacccagtagtcattcaggagcaggttgttcagtttccatgtagttgagcggctttgagtgagattattaatcctgagttctagtttgattgcactgtggtcggagagatagtttgttataatttctgttcttttacatttgctgaggagagttttacttccaactatgtggtcaattttggaataggtgtggtgtggtgctgaaaaaaatgtatattctgttgatttggggtggagagttctgtagatgtctattaggtccgcttggtgcagagctgagttcaattcctgggtatccttgttgactttctgtctcgttgatctgtctaatgttgacagtggggtgttaaagtctcccattattaatgtgtgggagtctaagtctctttgtaggtcactcaggacttgctttatgaatctgggtgctcctgtattgggtgcatatatgtttaggatagttagctcctcttgttgaattgatccctttaccattatgtaatggccttctttgtctcttttgatctttgttggtttaacgtctgttttatcagagactaggattgcaacccctgcctttttttgttttccatttgcttggtagatcttcctccatccttttattttgagcctgtgtgtgtctctgcacatgagatgggtttcctgaatacagcacactgatgggtcttgactctttatccaacttgccagtctgtgtcttttaattgcagaatttagtccatttacatttaaagttaatactgttatgtgtgaatttgatcctgtcattatgatgttagctggtgattttgctcattagttgatgcagtttcttcctagtcttgatggtctttacattttggcatgattttgcagcggctggtaccggttgttcctttgcatgtttagtgcttccttcaggagctcttttagggcaggcctggtggtgacaaaatctctcagcatttgcttgtctgtaaagtattttatttctccttcacttatgaagcttagtttggctggatatgaaattctgggttgaaaattcttttctttaagaatgttgaatattggcccccactctcttctggcttgtagggtttctgccgagagatccgctgttagtctgatgggcttccctttgagggtaacccgacctttctctctggctgcccttaacattttttccttcatttcaactttggtgaatctgacaattacgtgtcttggagttgctcttctcgaggagtatctttgtggcgttctctgtatttcctgaatctgaacgttggcctgccttgctagattggggaagttctcctggataatatcctgcagagtgttttccaacttggttccattctccgcatcactttcaggtacaccaatcagacgtagatttggtcttttcacatagtcccatatttcttggaggctttgctcatttctttttattcgtttttctctaaacttcccttctcgcttcatttcattcatttcatcttccattgctgataccctttcttccagttgatcgcatcggctcctgaggcttctgcattcttcacgtagttctcgagccttggttttcagctccatcagctcctttaagcacttctctgtattggttattctagttatacattcttctaaatttttttcaaagttttcaacttctttgcctttggtttgaatgtcctcccgtagctcagagtaatttgatcgtctgaagccttcttctctcagctcgtcaaaatcattctccatccagctttgttccgttgctggtgaggaactgcgttctttggaggaggagaggcactctgcgttttagagtttccagtttttctgttctgttttttccccatctttgtggttttatctacttttggtctttgatgatggtgatgtacagatgggttttcggtgtggatgtcctttctgtttgttagttttccttctaacagacaggaccctcagctgcaggtctgttggaataccctgcagtgtgaggtgtcagtgtgcccctgctgggggtgcctcccagttaggctgctcgggggtcaggggtcagggaccacttgaggaggcagtctgccgttctcagatctccagctgcgtgctgggagaaccactgctctcttcaaagctgtcagacagggacatttaagtctgcagaggttactgctgtctttttgtttgtctgtgccctgcccccagaggtggagcctacagaggcaagcaggcctccttgagctgtggtgggctccacccagttcgagcttcccggctgctttgtttacctaagcaagcctgggcaatggcgggctcccctcccccagcctcgctgccgccttgcagtttgatctcagactgctgtgctagcaatcagcgcgattccgtgggcgtaggaccctccgagccaggtgtgggatatagtctcgtggtgcgccgtttcttaagccggtctgaaaagcgcaatattcgggtgggagtgacccgattttccaggtgcgtctgtcacccctttctttgactcagaaagggaactccctgaccccttgcgcttcccaggtgaggcaatgcctcgccctgcttcggctcgcgcacggtgcacgcacccactggcctgcgcccactgtctggcactccctagtgagatgaacccggtatctcagatggaaatgcggaaatcacccgtcttctgcgtcgctcacgctgggagctgtagaccggagctgttcctattcggccatcttggctcccacctcccgaactcatccttttttatggctgcatagtattccatggtgtatatgtgccacattttctttatccagtctatcgttgatggacattttggttggttccaagtctttgctattgtaaatagtgctacagtaaacatatgtgtgcatgtgtctttacagtagaatgatttataatcctttgggtatattcccagtaatgggattgctgggtcaaatggtatttctagttctatatccttgcagaatctcctcactgtcttccacaacggttgaactaacactctcaccaacagtgtaaaagcgtgcctatttctccgcatcctcgccagcatctgttgttgccagactttttaatgatcaccatcccaactggtgtgagatggtatctcattgtggttttgatttgcatttctctaatgaccagtgatgatgagctttttttttttttttcatatgtttgttggccacatacatgtcttgttttgagaagtgtctgttcatatcctttgcccactttttgatggggttgtttttcttttttttctggtaaatttgtttaagttccttgtagattctggatattagacctttgtcagatggatagattcagatcagagctttaacagccagactttacagggaaaaggctgagtggcacctcctttatatgaagaaaatgttcttctccaacccacttgtgttcagtggatggaagaagctgttcagtaattataactgacacttgtaacacataactgattgatttaatgcccataaattttattttctttaatcgtaagatgtgaccgttaaattcttagaagacatttggctagtggattaataattaaaagaatattggatgaattcatctgcttcctattcagcagttcttttatttataaggctatttttctcaaaatgaatgatcatgaatatctaagaaaaaacaaaatatttagctgtttgaagatgaaattattatcttttgatgttgttttctttaaagtgtttacaatgataactaagtggtagggcttcttccctctgttactctaagtatgcctcgtatacatcctcaaagcattttttttttttttttttttggagacagagtcttactcggttgcctaggctggagtgcagtggcatgatctcagctcactgcaacctctgtctcccaggtttaagcaattctcccgccttagcctcccaagtaggtgggattacaggcgtccgccaccatgcacggctaatttttgtatttttagtagagacggggtttcaccaagttagccaggctgctcttgaactcctgacctcgtgatccacccacctcggcctcccaaagtgctagattacagacgtgagccaccacgcctggccacctcgaagcatttgtaaaagagcaaggtgatggggttcattaggtgtttggtatttgaaattaaatacctctgttattgatgaagccatattttaaatattatcaccactaaactcagttaaatatttccactgttaactacaaggttcaaatgcttggatattatagaagatatttgacttcaaagataaacgctacaattttgggtcataacaaatagcttttagaaggggaaaaaataagtcttgggaggaaaataagcagtctcttagtttaatatagcggttggcaaatatagatgcttaaaagttctgaaaatccccattgcaggccatcagagtgttgtaattaagtattaaattaattcagataaaaggataatccatcagggccactaatgtagtggaagtgtggtttcggtgtgattagtctcaccatggaagtcaaagaaagtcccactcagaatgaacaatgaaagaatcatatttgtctctgggtattttgtcataggctcaattgcccagtgccagtgtgtaagccactggtaaaatcctgagcccttagtcatgtctacaggtagctggctgccttagacattttatgatgacgaaattgaattccacttctgataatggtaatccatcatgtctacctctttttttctcttaaaactacactgacggccaggcgcagtggctcccgcctcatcccagcactttgggaggccaaggcaggcagatcgcctgaggtcaggagtttgagaccagcctggccaacatggagaaactctgtctctactaaaaacataaaaactatccggtcatggtagtgtgtgcctgtaatcacagtactcgggactgaggcaggagaatcgcttgaacccaggaggcagaggttcgttgttctgaatgacatagccaggggtggttatttctaaattttctgtgttgaattaagataggaatgtggatttcttcctattttgaacaacgaccaaaaaaaaaaaacgaaggctaagtgtgtttcactctgctaaaaatgtaccttttcttgaatctgtcactttttcacttacattttctgaaaatgaatataattaaccaccatggggctcagcatgctggtggccatttggaggaacttttctaccaacagtgtaacagagaaaagagaaaagggtactacagcgtacctcaacctcccctgactgttctgtgaagtacaagtgtaagatttctcactgtgatcttttgctcctctgcctttttactgccaagggctaagatgggcacagggccctttccagctgcccctgcctgagaaatgcttatttgatgaccaaaagcaataaccattccataggactaacggtgattaagtcagcttacaaatccacaagggtggaagagactgctaaagatattggaacagacatgcttaataatgcctaatttctacagctacttttgtgataatacgagaggctgaaatagataggggctgaacatgggaaggctggtgttatgaagcccaggacttggatttcagcactggtgcttactggccattgggtcttgaagagattggttcctttctcccagcctcagtctccttgtcccatcagattaataatgcctgccttgggagaggagagtcatacaggagagggcatttgagctgggctctaaagagttcaaataacgtagatgagcagagatgggcttccaagatagcaggaatagaaaacaaaagtgtcagaatgggtatgcatggtcttttgtgggaataccccaagctatttagcctgagagagaggtgtggtgtagacagctggagctgtgagttccatggctagaaatacggggtgggcccagaccacagagggccttcagcatctggcaaaggagttggaattaattcggtagaaaatgaagacccactgaaacaaagagggagccattcttgtgtgtcaggaactaagatttcaggaaccaaacgtaaaataaaaaccagcagggagaccattgtctcagtcggtttgtgctgttatcatgataccagagactgggtaatttataaacaaacaatagaaatactacaattctggaggctgagaagcccaggatcaagccgggtgcagtggctcacgcctgtaatcccagcactttgggaagccgaggcgggcggatcacgaagtcaggagatggagaccatcctggctaacacggtgaaaccccgtctctactaaaactacaaaaaattagccgggcgtggtggcgggcgcctgtagtcccagctactcgggaggctgaggcaggagaatggcgtcaacccgggaggcggagcttgcagtgagccgagattgcgccactgcactccagcctgggcgacagagcaagactccgtctcaaaaaaaaaaaaaaaaaaaaaaggcgccttgtggctgcatcctccagaggcagcaaaaactgttctcacatggcagatgcacataaaggggcctgtgctggtttcctctagcccttttagaaggcagtagtccattcgggggcacggggtggaactgtcatgacttgatttccagaagaccccatctctcactactaccacagtggagatttaagtttcaacacatgactttgggggacattcagaccatagcaagcagtgaggagactatcgtaattatccaggcgaaaagtaatcatattcctaggggcggtgagggtggtgtggaaaagcaagcaggaaatggctgagagaattcagaaatagaatgcaaaaggatttgtcggtagtgtgagtactggacacgaagaaatacagggagtcctggatggctctgaaggattcaagcctgtgactgggagggagaatggttctgccatgattagaaaacaggaaaggtggaagggaaagccagggaccttgagtacagttgtgtacctaccaagtgcatggatcaggagggagccctaagttggtatctccagcaaactgttggaaatatacaaatttgagtgggagggagaagtcaaagctggggaagtacatttcagattcacccaaaggtaggagatctttagagtttcaagagtcgatgggatttccaaaggggagaattgtagaaagagatggaaagagatacaagaagaaaatgacagggatgaagagaggagaaaaaaagagtaaaaagagttattcagagatgtcacagggaagaagataagtactgtgtatgcgaaacagtgagaacatttccaaataaaggacatggtaagtgatagtagataccacagacccaagaacagcgtagcccctggggagttcaagagctttctcgctggcaaaggttatttcctgtcaagatgaatgtgtatgcaccaataattattagtattccagaatatcctctctttagcatagtaagtgcttaacagtcacaagcaaaagatttatataaaagaaatgctcatttaatttatttaatcagacattggctaagttattagccgctacctatggctttgtaaaacatgaaaaagttggaggaaatctaatgagggtcttttatctgtaagggaaaggtcatcatgggcatcaagtattgaattttagaaacggtgccacagtgaatagggatatattataactcagattagacttcaaaaggactaatttgcttgggacttccatcatttaaaatcacttgcaataaaactgactacatgaaaagatattaatcacaagctttaatgctattccatcaaattattttaatgggtatatttgaacagaattttaatttttcagatacattttttgtcaatagaaaagagaatttgaaagatgattgtaaaatgttacaaatcaaatttaaatcctgatcttattttcattttctctagcaataaaactaaccagtgatgtgtctgaaatatatactacagcaaactcttgacacagctatgattggaaaatgagacattttggttaatcaaatattattgttaatagtgcagtgctgtctgtcggtctctaatttgtaaaaatcagagaaaaacatggtgaatctttggtgacataagagaagactcacaaatcttcatatcctggggtcagtttttaaagcagtaattacacatgatacaagattatattctaagctctctttttccagtaagaaaagataagtcaatgatgttccataaagctgattcttgtttaatcaatttttaaagtgggggggtaggcggcactgacagcattctttggaaagggaagcaacagaggagaaaggcaggatatttggtgtctgctcacattgggaaatacggggagccaggggtggttaagtccagagaaggctggatgtctgtctgcagggctacatctggaagggcaagggaacagtttccttgttgcctcagagcataggtcatgcagcacaagaggagcatttaggaaatgcagattttttttcaaggcaagacagtgaaaactattcaagaaggtagcaaactactggccctttaatgcttttcttatccttgcaagtgtgcaaggcaagacaggagattgtctgttgtctttcagcttgaatgagattgtgcctcacttactgccgccacaccaaagcctggcgtttattcctgtgcgatcattgtatactagggacgtctaactgtgtcaggaggaaatggcagctgagcccctgtggcctttcacctctagcagtgccacgctgcagcacattggccggctgccatgctcctgcctgcagtcctgccagcagctcttgtgagctgcgactttgcataagtagcttgaatgccatgtgcctcagttttcacatctgtaaaagggagatgataatggtacctatgtcatggctctaaacgcgatcatgcacgtgaaagcagttgaagtcttgcctggcagaagtaaatggtggctgctgctgctgctgctgttgtgattgttgttactcaccaaagagatggttttgtttggtttagatgagctgcttcagaaagagcaaaactattcagatgacgtcttggccaacatgattagtgaaccaaggatcagttacggaaacgatgctctcatgccatctttgaccgaaacgaaaaccaccgtggagctccttcccgtgaatggagagttcagcctggacgatctccagccgtggcattcttttggggctgactctgtgccagccaacacagaaaacgaaggtaagagtcccctgagccagcaagggcgttctgggaggtatatatacacatacataacgtgtgtgcaagagagagagttatcttttgtatgttcttgagtggtgaattttttttgatgtagtcataaatattttcattataattttactttaaaaagtaaatactaggagttactatgtcattaaaataatatatctgtgtaaattattctttatattttttatgctgcaaagcatgtaaactgccaattgttggaaaagacaacaactccattgtataggtggcaaaacaaaatggtaatgatttacataacatttgcaggtaaagggcctcttgtttcgcacatgtccaggtttgcattctagggaatattatccttcgagtgaacactcccggacgaaggggagccacagtgtattattgaagaggcagttcttcacaaggaaaatgtgtggcaataacattcttctaatttttattttccagttcctcttcttaatataaaatggtacattatataacaaaagtggatacataaagagcatgtactgtatatcatattattatgtttatgactttttcaaatgaggaaatggaggcaccaggagactaagttcttaagtgatgacttttggtaggaattttttagaaatgttttttaactgtgaggtatattgttccctctggaatggaagcacaaaattcaacttgtgtttatgacgtaatgacctagaatgccaccttccaaaaaagcagatagatagtgaaataaggaaaaattacagtttaccaacagagaggagttttgagggcctgcagagatgcagatttgacaggcaccaaagtagtcttcactggctacttattcttacatgaaatttcagattgaattaaatgttaaaggcaaagatagagaactacatataaataaaatttaattttgcttaagacttaatttgtgtttagaaaattaaatttaaggcagctgccaaaattaaggagcacattgctctaaatgttttttcctttggtacctcagagaagtaagattcttctctatcaacaaatttgagcagtagatggcatcctttttcacagggatttcttagcagaaacacctgttcaggcaagaatatctttcagcttcttttatctttttctacatgttcagaagtatacaattacacacaaacaccttgatttctagatacaaataacatgttttttaagaacacaacagcactttacctgattttctttatcaaagcagcaaatgttgatggagatttcatatttataatataccttataggccaggcatcgtgggtcacgcctgtaatcgcaggacttagggaggctgaggtgggcagatcgcaaggtcaggagatcgagaccatcctggctaacatggtgaaaccccgtctgtactaaaaatacaaaaaaaagttagccgggcgtggtggcgggcacctgtagtcccagctactcgggaggctgaggcaggagaatggcatgaacccgggaggcggacgtggccagtgagctgagatcacaccactgcactccagcctgggtgacagagcgagactttaaatttaaaaaaaataaataaataaagtaaaaaatatatataccttataacatgcaattagtactaaatctaaatataatattagaccttaagtgtactggacaagttttttctaaagaaccattgcagaaaatatatagactattttcacaatgtgaatcatcaccccaaatttgtttccttaatttgaaaaagggcaccttacagtaatagcaaacagcatgttactgacaatgtaaaaataattaaaactttaccatttatgaaaataattcttaatcacatagaagaaaacaattttagggacagttcattatcaaagacctggaaaactgtcctgttaaatgtattgagtgcagattgttttgtttctttacaggtagatagattttggtcattgaaggtcctcttcattcagtctctaatgagaatttttagtgaaaaatgtccgatctcattttgtaaattgaatgcacgctaaatttgctcttttactaacagcataccttgttgcatcagccttaggagaaaatctgcgtgcacacgtgtgaatgtacacacacacacatacactgtgaacccttggtaattgccaggatgtccatttgagcaaagcccttgattaagtacttctggatacttgacaaacacgcagctattacattgcctaggtctcatgaaaagagctgatattcttgttggatgattctgtttgaacagtagaatctggtataacaattttgggaggcaatagaacttgcagtgtcagagtcttgagttgcagtactcttcattatcagtcccaacattgacatatatatattgattatagcaaacaatttaaaaagccacttaagcaatttttttttttttttttttttttgagacggagtctcgctctgtcgcccaggctggctggagtgcagtggcgcgatctcagctcactgcaaactctgcctcccaggttcatgccattttcttgcttcagcctcccgagtagctgggactataggtacccgccaccacgcccggctaattttttgtatttttactagagatagggtttcaccgtgttagccaggatggtctcgatctcctgacctcgtgatccgcccgcctcagcctcccaaagtgctgggattacaggcatgagccacggcgcccggccccaattggtttttaaataaaatagacggccatcatctcataggatattaaatactaccccatacccctgaactcctgaatgatacagacccgagtttaaattccagccctgctatgtgcttctgagcaagttacttagcctctctggctgcttcctcgtctgtaaaataaggttgacaataattcctaactcagaggtatagtatgagcattaaataagaaggcataaaaaagctcttagcaaaattcctggaacgtagtaaatgtcagtggtagctttttttttttttaatggagccaggatcttattagagagactttatcagcctgtctcaagatgaatcaccttatggcctcaacaatgtatccttaaaataatgaatataataagccatataatgagatacagtcctaaagccgtctctcttctaacaccgtctcccacctctccccagaaacttgttagtctttctttgtacagacatgtgcacacacacacacatacacccaactactgaaaatatctaaaattctcaaaggatttccttttgttcttcatgcagtcctcattatcatagtttcaaatgcttaccaaaaatttgttgtttttcttaagaacaatcagtgaaatccagaggaggttctgatgcccattttttaaatttacattgaagaaaataagcatatcagagttttccaatgtgctgtgatttgccttaacaattttttattctttggttttcacatccacaaaacctaaatgaatggctaggctgaaatgaagctgttgttacagaattgtgctcacagatcgtgaaatgatctggctggaagcattagcgttgatgacatttgtgtttgttctactttttcctgactgcctgagaagggcagccacaaagagcagcatagcatgcagtgactgccagcaagtctttgtggccaacagtctgcctctttgtagataatacctagatataatatgtagataaaataatatttttaaagagacaaagcaggtcttataagacttgtatggatgtatttgcaaaatgtgaagctgccttctagtatatttttaactagctttatagaggcaatgaggaagccaatttaaatgttgaaatttagattaaataaatatttcattaaacttacaaaccagttcttgtcagcctcttatctatatgtaaaactggtgtactgctgattcctcattacctttggcctggtagagagtttgtacaaggcagcacggttaatagttgaggtttattacaaagaataccagaagtaacagactcaaaaatcccagaggtctgaccattctgtttctctcctcttacagcaaaggatttgattcaaagctactgagagcaagagaataactcatttctgcttacattttattttaactctattaaaagttaaagctaagataatgtatttcttgtttttaaattactaaacagccaatgtaagatgttttttagcacttcattgatgaagttactgtctggttaagtaaaggtcaattggaaaaattggaaagtatttgcagtggattgggaaataacacactactttgttttgttggtgtgtattcttttttttcggcaatgatatcataattgccttttaaaaaacttttaatgtctgctccctgagctacttattttttgagcattaatttatactaaatcagcttcaatcttttaaagcagattagggtttatgtcactgaaactagttttgtttaatcttcctaaaaaatagggttagggttttattattgtttttaaataatacatgcctatttaaaaaaatagaagaagaagaagaagagcggggagaggcagagaaacttataggacaatatcatttgtaagtttctttcacataagtatacgcatttgaaccctggaaaaaccatttactttgtgacacaactgaagttcagaaagaatgtgattagccccagatcacagagaaagtaagtggtgacattagcagtggcccgtgggactaccagctcctcagcctgcatttaaaccacaggtacacttaacttactgccccgagttgcatatacattttctaataacgtaactattgatgtatgtgctcaccaccacttcaaggtacgcgtttgccctcgtgcatgtggtctgttgtgttcttaactgcagttgaagcactattgggtccctcatcatcaggaaattctcacaaagtacaatgacctttcaactaactgcattttacaaggagtaatacagttactcattacaggttgctgcaaataggaaaaaaaatgaagtatagaaaaaccaaacctcattgtcgaaatgtatttgggagttgcagaaggaagtgaactatgtcttcctctaatgcactagtgaaatactagagaatagtcactctcgcatcagtagttactatggaatatttaatcataggatatttaatcagtgcagttctgtagtatctggtagggtctcaaacaggctttaaaggttacttatttgttcctcaccataattagaagatgcagatgttaacatttctgtttccatatggagaaacagccacagaagtggcgcatcccaaggccacagacattgtaaatgttgggcccaggcctgggattagatgcctcaccctccttttgactccaccatgctgccagtctctacatgagaaaggaccaaatttttatttcatccaaatatcctagtgctcccggaaatattttcttatattttggagacttggcttactgccactttttttctccctcactgtttctattaacatgtggcatccaaaatcgatttggactgagaatcccacctttgaatgcctggcctgtgtgcatcagtaagctggatggttttgctgaaattgttagaagccatttcatcgagcacaccgtgtctccttcagcacctgtgctcactttgtcttacctttttccctttacacttgccaccttaccaaagcagcttccccctgcacctacctccgtggcttcatttaccctatgaccattattaatcctaaaaacttcacttttgtccccattccttgtttcttcaaacgccagcgtaaaacaaggaagtattttctgagcatcagaagtgctttggaaaggtcagatgatggtgaggaatatcatgctgtccacactgctttctttgggtcggacccagaacacataaaaagggaaaattgtgaacaatggcaaatataaaatgaaatatcctcatttcacacgtttcagctgtatgtcatctgtcaaatggaagccagcctttttgaaaaagtgagaaaaagactgcggtttccctcttctgccctcatactaaggacaaatttgattcactcactaaatggcagattatatagtaaaactttgctctcctgataaattcatatttgcacttcccctggaaatttaacagagtccttttgtagttaattaactgtaaaataagataagattgggcagttgtaaaaggaagtatctttaaggttttctgctaggctgggaatattttatttctaatcaaaagccaagaaactatctctaaactagctcagagggaaatccaccctccccacccctcttctttgatgttgctgcgtatcctggtgagggcttttattagaaaactaaggagcaggactggcacatcaatagcgataagccatttaaagtggtgcccctcctggtcctcgatgctcgggattaactcactgtggttcttttctggctgctccttttttgtaacttgtttattgcatatgcttttttccctgctcgactatgtttgggagccacgacttaccatcttgatttgtcttgtttgctttctgtgtcccttgcttcctgtgcccagttgagcctgttgatgcccgccctgctgccgaccgaggactgaccactcgaccaggtatcagaaccgcttgacttgtgcctctccgcatcttgggcctaagctcgagcagacgttgtctcctttctgcattttaagcctctctcaattgtacttactgcagagtagaatttgaagtgaccttagaaaccaaacttttaaaaattccccttgactattccttactcttcatttcccaagttccgagtgaaatgattttttttgtttctgagctttccctttgaaacctaaaagagagcccttccaaatttgggtttttttttttcttttttctttaaaacaaacaaaacaaaacaaaaacagagacgattatatacagcctgtccttaaaaacagaagcccagatagatgtagactctcaggtgatgacttggataccagtgtgaacatctctcctttcttgtttggtgtccagatgggtaattttctaactgaactgggctcaaacttcaatcagttactgaagtagacatgatttcctgaaaataccagaattggtttctttccagagcccaaaatacatcttctgttttgtgggttgtatgtacttattctcaatgagtggctaaagtaacacaacagatgtggatgcataattttgcacataagccctttttttatgtattacttaaaaatcccattaacactgaaatagacacttctttttttacagtttcacaaacattaagaagaaacacatttttattttatgaataatgtcatagcacagcagaagcatatatgtgcctggtgtctactctatgaacaacctcacccaactgatagtagccagtgctttcagtgaatcaaaaagaggaagaaagttattgaattgacaaatttgtgtattccagggagattttaatcccaaataacacatacttttccatatttattttcttctttatcctcataatgtccccaggcgatagtcaaagaacagggaattaactttctttgaagatattaatacacagaggtcaacctttgctgcctggttcagatacagtcagcagcagaccaggagacccaccctgtccctcacacttccaccacaggctcgagccatgactgcctccaagcacggtcactgatgaagactgagagtctgcctgtggcatcttcatgcctttatgctgtgattaacagtggcagcagagacagtagtgtgacacgtcttgacagctggtctcgttgatttatgaatttctgtctgtaggcttttaaggggaacttaaattatagtgagtcagagacagtttcagttcttctaatgtcctccttattgtcaatgtcatgtaagggaatctcaaggagccaggagttgacattcctgttctgctcagccaacttgtaaggcctcgggctgagggtcagttcagttctaattgcaaccacagccagctcaggttggtcatttgccttgggacttttttcatggtgcttctctttaaaagacatgctcttcatctacaagcataaaatgtaacttagaaagcgctcattcgactcattcaattttatcaaatttctacattgggccaggagagcctatatgttactattgaaacatccaggaacaggtgacactaccagtcaatgtttttttcttttttaaaaaaattgttttttgattttttttttttttttttgagatggagtctcgctgtgtcccccaggctggagtggagtggcacgatctcaactcactgcaacctctgcctcgggggttcaagcaattcttgtgccccagcctctcaagtagctgggactacagatgcgccccaccatgcccagctaatttttttgtattttcagtagagacgggatttcaccatgttggccaggctggtctcgaactactgacctcaggtgatccacccacctcggcatcccaaagtgctgggattacaggcataagcaccatgcccggcctattcttttaaaaaaaattttttttaatctaaatctaacaaaaaggacacctccaaacgctgtcaaacaaaaacagtgtgttttaaaggaagagctagagaatagttaatggtattacactggtgggagaaaaccatccaaaacctttctcataacagtaagaatatgatgtcacttggggatttcacaaagatcaatccactaaattctttctaggtttgaaagaaattaaacggtagggtccctgctctcaggagcttgaggtataatagaaggaattttgcatatttggaaacatgagatggaatttggaagacaaggaaatacaaagcaacattaagtgctaacaagaatgttctgtgatgggaggagatggagtactaacccaggggcatgttaagtagagaacttactggagatgggcttccagagaggttatgaaagatttgaggcacctggattggcaaagaagaagggaacaattctattcagaagagagggtggcctaagccaagcttcctttcatacacagcgtaggcttgggttgcccagtaagatggctaaagttgagaaagaatgctcagatatgaagtgaggaagattctagttaaggtttgtctatgaatagcagtatttactgcacatgtattaagccatgcgtgtgttctgtttttgtgcttgtagtaagtttatcaaacatttgggctaatttccccgtgttttgtagcatagctttggttcttcttcacattttagagaccacccacttgagtctaatgtgccgaattatatctttagcctttccaaacttagaaagccttcccaagattgtcatgccgttcaagtgatggcattgtttttgaataatcactgttgtcctcagaaacaagttaaaaaaaggtttttgtttttcccccacccagtgctttataatcatgactgaggaaaatggcttctccttaactctcatatctaaaaaaacagaatatggtagcttccagcatgcagtgtcaagtagggaccattgtaataacagtggtgatttgggggcatagtggccattatagctcctcctcctggcttacttccaaagaaaaaatagactctgaaggactaattatacagtttgaccagaataaaaaagaaaaacacattagcgagctcttcacatagggtagaaagctaccctttctgttacaattcatcaccacccttctgcagtccaaataaagggaaaccaggtccttgacccgagccatgcaagaggtgtcatgaaggacatacctcccttagcccccacatgaacaaaaggctctgtccactcatcatgacttacaggaagagagagctggagtcaccagggcttagggtgaaatcagcacaactcaagaaagacctctaagtaagcctgcaaaccaaggtccctgccatttatttgaaactactcatcacattttattacatgcattatcaccttattatgaatatttccctatgtgccagcttactgattttgtcttttagtaagatttgcttaatgtaaaaagtcttccctagatgactattcatgctaaacaaacatgaactattatagcaagagctcttctgccaagagcttctcaaactattgagctgtaaacatgaatttatctgtcatgctgacttgataatatgaatttttttttttggaccaccaaaagtattcacagtatcatttcaaaagtagtgtgggcttgtaaagtttttagtggagagctcttggttttgttttttttttttttttttttttaaaacaggatttgtctctgtttccaggctggagaacagtggcatgataccagctcactgcaacccccatttcctgggctaaagctatcctcccacctaagtttcccatgcagctgggattacagggatgtgccaccacacctggctcatttttgtatttttagtagagacagagttttgccatattggctaggctggtctcgaactcctgagttcaaactgtttgcccgcctcagcctcccaaaggctgggattacaggcatgagtcactgcacctggccgagagctcattctttttttttttttttttgagatggagtctcactctgtcgcccaggctggagtgcagtggcacgaatctcggctcactgcaagctctgcctcctgggttcacaccattctcctgcctaagcctctagtagctgggactacaggtgcctgccaccacgtccggctaattttttgtatttttagtagagacggggtttcaccatggtcttgatctcttgacctcgtgatcctcccgcctcggcctcccaaagtgctgggattacaggtgtgagccactgtgcccggccagagctcattctttacttttatttttcagtataaatatttggctccaaaatctaaaagggaagactcttcaaactgttcaagaaagttttcttaaaaatctcagaaatatagttctaacctattgtgttgctagatcttttatttatttatttatttttggagacagagtctcattctgtcacccaggctggagtgcagtggcacaatctcagctcactgcaacctccacctgccgggttcaagcgattcttatgcctcagccttctggagtagctgggattacaggcacccgccaccacacctggctaatttttttttttttttttttttttttttttttgtatttttagtagagacagggtttcaccatgttgaccaggctggtctcaaactcctgacctcaagtgatccacccagcttggcctcccaaagtgctgggattacaggcgtgagccaccgtgcttggcacgttgccagatcttaataacagaaaaggagtgagctctaaagaaatcactggttatataaggatctcagatttaaaagggctatagaaagattaaaatatacagccagtgagaattaagagagttttagcatcactaccctataaaaataagtgtcagaaaggttcgtttcagcagaatgagttgaaacttaaccaaaaaatacttaacaatattaaagtaagaaaataaataagaatagagaactctgtgggtctcgtagcaagaagttgggggttgagggttaggtcattgagaggaccagagttaaagaatgagaaagggaaactgtcccacttccattgtgccttttatgtctatattaaagagaatgaacttctgatgaaaggaaattaaagcccgagatagatcaacatgagaaaagaaagccctagcccattagttacctattgctacgtagcaaataacgcgagaatttagcagcttaaaacaacaagcattagtttcttacagtttttataggtcaggatttgggatgtggtttagctggatggttctggcacagtgtccgtcatgtggttgcagttaagacactgcctgagctaaagtcatctgaaggtttgattggacctggtgggtctgtttccaacgtggctcactcacgtcactgttactaagagacctcagtatcttaccatgtgaactctgtaatgctgcttgagcgtccctacaacatggcatctcgcacccctgcaccaagaggtccaggaaagagattaaggaagttttagtgccttttttggcccagtctcagaagtcatacaccatcacttctatcatgctctgttcactagagcaagtcactacatcccgaccacattcgaaggaagggaatcaagttctccctcttgaaggaaggagtatcagcaaatttgtggatatattttaaactatgacatcttgctacccaagtccaagttcttatgacccagaccaactgcaggctaagagaacttgaaggggaagtagcaccattgcctgtggtctttgtggaaagctgggaaggtagggataggaaaatgaagttctgaatagcaaaaaggagagaagatagcttcacaatctgtaagccaggtatagagtgacattgattgtgggtctcttttcaaataggttatcaagtggaagctttttgaacaattggatgaggaaatggtgctaggtcacaaccagcgtggatttcctaggttttgtcagattatccttaccttctccttgtataggctgtgctcttagactggcacatcatatgctgtggacattgtgcttttcagtgtcagcaagatgtgtcacaagtttcccagaatctcgtagacaagattgaaagagtgattaggccaagagcaggaagtgaattcccctgggagccaaaggaattgggaatgtgtagcccaagtaagacaagaaccagcaggaacatgcctctccttagggtcgtgatacctgttcaaggttttaatgtggaagggaggattaggcttgctctgtgttgaatcaggctcaaaggatggaagttacagggaagctgattctggcttcatgtaaaaaaaggacagtttgggcaggcaaatctatcaaaaaatggagggaaattgatacattcctctatgttcaaacaggaactgacaatctgcccctgggtgggaacacggtagagaagatgacttcaaaagcccttttcatcctaaaattctgatgtttgataattaaatgttatagcatggacactgacatttacattttttacttatgtttttggtttttaaatgactctgcattttgttttaagcttcaaattattatttgaataatgaaattcatcagaacaattagtgttaagaatcatatagcaatttatagaaaaggaagagttcgtaggttataaattctgttagttgctaagaagcatttttaaaattatgtactatagctctttattcagcagacgaaccaattacaatctgtgtaactagaacacttgactaaaattatataatttttacaacgcttcactgcatagatacatgaacataatttatttgtaattggaacaaagccccaaagtagcagttttgttctaccaggtaattaatgctcatttttaaagccttttattattatttctgaagtaatgagtgcacatggaaaaagacacataataggctaaacaataagcccgtaagccaagccaacatattccaggaacaaatccttgccaacctctcaaccaggatttaacttctgcttttcccccattttcaaaaattatagcatgtatttaaaggcagcagaagccttactttcaggtttcccttaccctttcatttctttttgttcaaaataggtagtaattgaagttttaaatatagggtatcatttttctttaagagtcatttatcaattttcttctaacttcaggcctagaaagaagttttgggtaggctttgtcttacagtgttattatttatgagtaaaactaattggttgtcctgcatactttaattatgatgtaatacaggttctgggttgacaaatatcaagacggaggagatctctgaagtgaagatggatgcagaattccgacatgactcaggatatgaagttcatcatcaaaaattggtacgtaaaataatttacctctttccactactgtttgtcttgccaaatgacctattaactctggttcatcctgtgctagaaatcaaattaaggaaaagataaaaatacaatgcttgcctataggattaccatgaaaacatgaagaaaataaataggctaggctgagcgcagtggctcaagcctgtaatcccagcactttgggaggccaaggcgggtggatcacgaggtcagaaattcgagaccagcctggccaatatggtgaaaccccatctctactaaaaatacaaaaaagattagctgggtgtggtggcaaacacctgtagtcccagctgctggggaggctgacgcaggagacttgcttgaacccaggaggtggaggttgcagtgagctgagatcgtgcctaggcgacagagcgagactccatcccaaaaaaaaaaaagaaaagaaagaggctgtatgtatagttctttcagactacaaggcagcaaagttcgtgcatgactcgggacttaaagtggaattaatttcaatatagcagccactttgacttccactgtgttttctgggaaaataggtttacaataggtttatttgaaggatcaaacacatgcatacactgcttggttttacagaacactttatgtggcttaaattcacatccggaactgtcttcctttacccattcatttctcccccagctctttcttttcattccctcccctacctcccatgatttaacttctcttgcaagagtaagatcatggagtgagcaggaccccatgatgttcccgatagtgttattcatcaaaaggtttgtgcaaagaagacagcagcttccttttcagatgaaatcacttttcccccctaatgttagaattggagtaaatcaaaaagccacatctcctttgtggtcagctctagtagttatataaaatcctttaccaaaagcttagaaatggagataaatcaaatcgtggattatgttagggttccatcttatcagtaggtgcagtaagagggttaaattaatgaagacgacaattttatcacattcagtggtggacagaaaaatggtaagaaaatttccatagcaataatacttaaagttatctcaggcacttcttttgttttgttttgtgtgtgtgtgtgtgtgagtgttacttttttccaagcagaaaatgtcttttcaatattcataaagttgataaatcctagtattaatctctaaaagaaacacctccaaattattatttatgccttacttgactccaaataattgtagcaaataaaaaactgacttgggatttggatttgcattcttaactcccatagttctttttttgtagaaagacatttagctttttgaagcatggttttcattggcaagataatctagtatcagttgttataagatcagggtttctcttgatgaggctgttgctgaagaggttaataaaaactggggaaccactaaagagttgaagagttggtggggtagaaagctgacgattaatgtacagatttgcatttgtcggggcctggggcctgtgtcatataagcccatccccacaattacactaacgcctataatgcgacagtgactaatggcagcggcagcaattaggagaatcagctccctctactggactagttaagataatgtattataattagtgcaatgaatattacaaaattacagtattttcttaaaggcacaggcatatgtccagacttgtatttattcctgattacctcacactagtatattagctaattaatgatttgcttttcataaaaatgttgagctagcatatttgtttagtaaagggaataattatgaacaatttctcattttgttataaaccacgagtaaaacacttttagaagttgcttcatttgctatattttatattgcctttccagattgctagtatgttagtttcagcttagaaaaatcagtcatttgactaccttgaggctaaattgaaagaattttttagggaggtacaggcataccttggaaatttcagaacaccacaataaaacaaattttgcaacaaaatgtcacacaaattttttggcttcccagtacatataaaagttatgttggccaggcacggtggctcatgcctgtaatcccagcactttgggaggccaaggcaggtggatcacaaggtcaggaggtcgagagcatcctggccaacatggtgaaatgccatctctactaaaaatacaaaaattagctgcatatggtggcatgtgcctgtagtcccagctactcgggaggctgaggcaagagaatctcttgatcccaggaggcagaggttgcagtgagccgagatcgcactccagcctgggcaacaagagcaagactctgtctcaaaaaaaaaaaaaagtttgtatttacactatactctagtctgttacatgtgcaatagcattatgtctaaaaaaaaaaaaagccatgtatatactttacttttattagtaaaatattttattactaaaaatgctaatgatcatctgagtcttcagcaagtcctaatctttttgctcgtggagaatcttgccttgatgttcactgctgcaggctaatccaggtggtggctgctgaggtttgtggtggctgtggcaatttcctaaaataagacaataatgaagtttgctgcatcgattgactcttcctttcacaaaaagatgtctctgtagcatgtgatgctgtttgatagcattttgctcacagtagaacagctttcaaaattggagtcagtcttcgcaaatctagccactgcttcatcgagtttatgtgatatcctaaatcctttgttgtcatttcaacagtgttcatagcatcttcaccaagagtagattccattgcaagaaaccactttctttgctcatccataagaggtaactcctcatccattcaagtttgatcatgagatggtagcagttcagtcatgtctttaggctccacttctaattctagttctcttgttatttccaccacatctgctgtgacatcctttactgaagtcttgaactcctcaaagtcacccatgagagttggaatcattgtcttccaaactcccgttattgctgatgttttgatctcccatggatcacagatgttcttaatggcatctggaatggtgaatcctttttagaaggtttgcagtttactttgcccagatccattagaggaatcgctatctatggcagtgaatagccctacaaaatatatttgaaatatattttgaaataataagaggctgaaataataagacttgaaagttgatccacaggctgcagaatggatgttgtgttagcaggcatgaaaacaacagtaatctccctgtacctgtccttcagagctcttgggtgactaggtgctttgttagtgagcagtaatattttgaaatgagtcttttctgagcagtaggtctcaacagtgggtttaaaatattcagtaaaccatgctgttaagagatgtgctgtcatcccagttttgttccatttatagagcatgggcacagtagatttagaataattcttaagcgccctaggacttttacaatggtcagtcttggcttcaaaaacaaagtcgccagctgcattagcccctaacaagagagtcagcttgttctttgaagctttgaaggcaggacttctctctagtgatgaaagtcctagatggcattttcttccaaataagtctgtttcatctccactgaaaatctgttatttagtgtagccaccttcatcaggagtcttatctagatcttctggataacttattgcagcttctacatcagcacttgctgcttcaccttgcacttctgtgttatggagatggcttcttcccttaaacctcatgaaatcaacctctcccaacttttttttcttctgcagcttcttcacctctctcatccttcatagaattgaagacagttgtgggccttgttcttgattaggctttggcctaagagaatgttgtggttggtttgatcttccatccagacaactaaaagttttctccgtatcagcaataaggctgttttgctttatcatttgtgtgctcactggagtagcacttttaatctccttcaagagcttttctttgcattcacaacttggctaactggcacaagaatcttggctttcaatatgccttgcccactaagcttaattatttctagcttttgctttaaagtgagagacctgtgactcttcctttcacttgaatacttaagaggccactgtagggttatttactggcccactttcaatattgttgtctctcaagggatagggagcctgggagttgagggggtggagtggccagtttggggggcagacagaacacacacaacatttattgatttagtttgctgtctttatgggcatgtttcatgacactccaaaacaattaaaatagtaacatcaaaggccactgatcacagatcaccaaacagatataataatttttaatgtttgaatatttaaataattaccaaaatgtgacacagacatgaagtgaacctgtgttcactgttggaaaaatggcaccaatagacttgttcgatgcagggttaccagaaacctttttgttttttttttttaaatactatctgtaagcactactgtacaataaagctatgtatgcctgtattttcattaagttgcagagcaaacgtggtaatatttagctttagttttacttcatctggcataagatcaactccttatataacaagatgataaaagttgtggtgtgcttctataatttcattcaagtagataaagttgaaaaataatgacttgcttttataaacagtatgaagcaatgtagtgcagtaaatgaaattttattccttctttacaatgttctcaaaattatttttatgtttaatccaaataaagagcaagaataaagcaacatttcagattttggtttctggagacaatagttagaaagcatgagttatgagtgacttaaaattcttgttgcctgtacttcactttgaaataacattatgctttaaaaagcattacactgctaaaggttaattagaattctgcagaattactatagctaaaagtaggtaacaagatatctttttttctattgtttaactcctttgtttcagaatgcctattcctgtgcattaaaagtgtccctccaaggaaattaggacatctgcagagttgaaaaacacctaagtctcagtcacttagagtcacacatcagggctcagagtgctatgactaggaaaatgctgacctcctttcattagtatgatcgtgcctttccagcttttgatagatccaagcgctatcttcccaccactcaccaaatgttccacctgtcaaagggtttcaggtccctgcagacttcggttttgacctgtggggaaagtagacttcctcgaactggggaagccacatgttgtacatccttctataaactatgattatcattcttagtaggaaaatatgtgatttctttttttttttttttttttaaagtaagcatcaaatatttgaccaaccagttgggcagagaatatactgaaactttttatataacctcatccaaatgtcccctgcatttaagaaatgaaattcttctaattgcgtttataaattgtaaattatattgcatttagaaattaaaattctttttcttaatttgttttcaaggtgttctttgcagaagatgtgggttcaaacaaaggtgcaatcattggactcatggtgggcggtgttgtcatagcgacagtgatcgtcatcaccttggtgatgctgaagaagaaacagtacacatccattcatcatggtgtggtggaggtaggtaaacttgactgcatgtttccaagtgggaattaagactatgagagaattaggcttagctttttgctaagaactagctaagtatctcttttaaaaaacgaatcagtgtgcttccatgatgcttgggttacagttgttctttcttgttttggttttcattcattgcaacttaccgtgaatattctgctcaaggtattgagagtgtgtgttgttatctcaacttacaatttgtgttgaagttatcaaaataatacaaatgataatgcatgactttaaaaaagcatgattactcttagacttttttttttcaaacacaagcaacaaaaaccagtacaagaagttaaaaataaaaatagaagtaggaagttgctttttccaaaaaaactaaacatgtttattcttggatttcttttgtcttaaatagtctggcctctcaatacaaccaggtaatagtaaataatgtgacttttcagtgcagactcttacctttaaagtttctcaggaaatcacactataccaaatggcccaccaaaacatacatgattgttatttgagagttctgcaacctattaccctgcacttccacctgaaatatcttagtttcaaggtgctatactaaaacaagaaagagagaaagaaaatttacgaataagttatttttatgcatttgaaatgccatttggatgggggaaaaagtgttaaaatctcacagtatatgcaactttttaggaaactgtcttgcagagagtatagtgtaaacataacttttatatgcacagggaaactgaaaaatttgtgtgacatttaattgcgatattttaagagttatggaatttttagagctgaaagatttattgatgatgaccaatcaaattgatcttctcatcttgtagatgagggaactgaggccgagacagaagggttcaaattatgcaaggtcaagctcagagtccagatttcccctcatattccccattgctttttttttttttttttgagacagtctcgcgctgttgcccaggctggatcttggctcactgcaacctctgcctcctgggttcaagcaattctcttgtctcagcttcctgagtagctgggactatgggcacacgccaccatgcccggctaatttttgtttttagtagagacagggtttcaccatattggtcaggctggtctcgaactcctgacctcaggtgatccacccgccttggcttcccaaagtgctgggattacaggcgtgagccaccgcgtctggcccccattgctttttccatcagagaaaagtccaggtgtttctagggagttgaagattccactatccccaaggaaatgggctctaaaccattcttgattagaagaggacaggcagagtttaaataaatgaaatttgtggtgaagccagaaatttcattttgctcagcaattaaaacctctgcagactacaacagaagctgctgatggaaattggggtggagcctcatttccccattcatactgacgtggatgagcagtgtgaggaaggaaaccaagagaacagcaggcagcagggtggaaaggaacggactgacccatagatcagagtgtgagcacataaaagcaatgaccccactgtcatgtttggccattgcaccttttgtgatagtatctaagcttatgtccctcaaaacagtgtaagataggttttcattagtatcagcttatttcatttctgctcaaattaatttttaaaaaaatttaattccatatttgagcaaataaagatgtcttcatacttgagtaattcaagaccccttttttgctgctgttgttgttttggtttttttcatggttttgttgttttcttttgttgttgttgtttctttgttttttgagatggagtcttgctctttcacccaggctggagtgcagtggcatgatctccgctcactgcaacctccacctcccaggttcaagcgattctcctacctcactctcagcctcctgagtaactgggattacaggggcataccaccacgcctggctaatttttgtatttttagtagagacagggttttgccatgttggccaggctggtcttgaattcctggcctcaagtgatccgccctccccaacctcccaaggtgctgggattacaggcatgagccaccatgcctggccttcaagagcactttttagtttatttaatataattctctttgttgccggtctgtccgttgaagttgccttctttgatgccagaggccaaagacttggcttcctcgggcttccataacaaagtaacacagatgggtggattaagcaacagaaatttaccctctcacatttctggagtgtaagatcaaggtatcagccaggttggttcctccccaggcatctctccttggtttgcagatgcctgtctgctccctgtatcttcacatgaccttcactctgtttttctgctgtgtcctaacctcttcctacaaggacaccagtcatagtggattaggatcaaccctgatgaccttgtttaactttaataacctcttcgaccctatctgcaaatacagtcacaggtggaggtactggcagcttaggacttcaacatatgaattctagggggacacgttttagcccgtaacagaccccagtgatgctgagcataaaagcaaggcctccacctggagctccttcccctggctgtgcgtgagaccaggtcctacctcagacctaaggaaaaagaatccccaaataggaggctgcgaatctgagtgttgaaaatttccccaaatgaatgagatgtgcagtcggatttgagaatccctgacacatcattttaacactccttccttttagttctccgcgcaagcctcagggagtggaaaatggtatctctcacctcccagataaccggttgccttttaagtgctcttccagctgcctgaattaaaacgctctttttttagtcagtttaccaagcagtgtctcattggacttaaaatgtcagaggagaagttgacactttgacccagattctgacattaatttttaagccaggaggtatccttgcaggagcaaaatcgggaaggatggctgttcagctcttctctcctcattttgctgtctactggagagcaactggaagcctttctagatgaggggctccacctcattcgtgtttgttttgtttatttcctctcagctccttcccctcaagacctttgtgactgtccttcctgaaagcagccctctgtgcagccccatagtgtgtctgtacagcaatgttgaaatagaccacattccgcttttctgtcctcaaaaaagatgtagtttagctgggatggtagaacctgaacacagggagttgcaacccagcctaggcatgttcccaggtgagagagcacggtgggctttcagagcaccatttttcttagcattccagcgtctgcacccacagaagtgatgcttctgcaacatcctcttcctaccttaacaggcactctcaccctcaagtacatggaaatacctttatttccggctctggctaaccttcattaatcagtaaccctacttcagtaagaacaaaaatgagtacatcaatatttccagttggactcacctcagtcactcaggacagaataccattgtacttacataccatcgtgcctgaagaagtcatgatgaaagctttggtttccaggagattttttgtttttagagtgaaaaatgcccgcagaagatcacagagataggaaccctaggaaaaaaactcctgagaacaaatgtataaatgaaacaagcctagaacagtcacataccacttcacactggagagaacgttctgagaaatgtggcatggggcggtttgatcgctgtgcaaacatcataaagtacatgtacataaatctagatggtatagcctgctacacacctgggctacacacctacaactattgctcctaggctccacacctgtgcagcatattgctgcactgaatactatagacagttgtaacacactggcagggatttgcgtatctaaacaaactagaaaaggtacagtaaaaaatacggtattatggggccaccatcatatgtttggtctgtcgtggactaaaatgtcattatgtggcccataactgtatttttattggtagagttgttagcatttggaaatgagcacttgctagttgttgtttttttttttttttttttttttcaaataagcaggaaatattgacttactgaatttacttagccataaggccagagagtcactctgtgagccattggccacgctttcccaaggaggtaactgtgccttattggtgcttcaagcagtgaagcaatagccctttattattaccactccccaaatgtgccctccatgtcagaatagccctctggtggctggaaatctcagcactagctgaattaaccaccttgctcctgttttaggacgttcctgcaaagcccactaatcccaggatctgtttagtagcaagcggtacttttctacattcacatacatagacactggatatttaaaaatacgtattgtagctctttctgctactctccccagacatgtcacctttaataaggagaagttgggggcacagcttctctttattataggatgtgaaaaagttttcctctcacagatctgatcacttgaacaccagaagtctccccgcccccacctcctggttatctcattaatgatctaaataagaagagagttccttttatttggcttttatggaggtatggcatatgactttttctaagtaatatgctgtcacactggtgactgtataaaaagatgtccttagaggtcctttcttcccggccagaagctgacccaccaggatacagacgcactgacgttggcattgtagagtagttggagagagtggtcaggttgaatggaaagccacgataaggaaaagtgagggggggtgcagaacctaggagtggcttacagtgagcagcaggaagagaaattggaagatcaaaggaaagcatcaaaaatgatcacaggccaggcgtggtggctcacacctgtaatcccagcatttggggaggccaaggcaggtggatcacttgaggctaggagttcgagtccagcctggccaacatggtgagaccctgtctctaataaaaatacaaaaaattagccaggcgtggtggcatgcgcctgtagtcgcagctactcaggaggctgaggcaggagaatcgcttgaacccaggagatggaggctgcagtgagccaaaatcacgccactgcactccagcctgggtgacagagcaagactgtcttaaaaaaaaaaaaaattatgaagggatagcaaaggagttcctgaacctgcctgaagaattgcttgatgttggccataaacatagtcaactgccttctagttatatataactatagagagatggcatcaaaattaggaaaacaagcatctatacaactaggtagcaggcagttactgggaggttacgagggataagtcactagcttgaaaacttcctattttctttgcttttattttttttttccgcagacttgtggctcctttgatgtgtcacactattgttgtattgttcgccttagttcccttaccctcctttactcgtctggtccatctcaatgacaggattctgtcgtttggcctgactcagtcccttgtataaaaggacatctattaatccacatcctgctggttactgtacataataaaatgtaaacgtggtgtttcctgcctctcctccaagctcacacacccgcatgtaaatactctaggggcaataggaggagacctagaaactaaggtcacccaaatagaatcttgtccctgcaggcggatagctgagctctaaattactctggatacagtgaaggactaaatggttccaatgaatcaagttcagggagaaaagggtcagggggtatggaggttagccaaagagtgtcaaacgttctcctcaaagctattttagaacaaggctggtcaggctatttgggctcagctcttttcagcgtgtgtcataggcagcagccagttgaagccatgccaccatgcagtgcaggggtccaggtctcaggaaggtgcagcgtaccgagagtcacatgaagacctcagatcatttcctgctgctgtgtaatccaggcagtctgggaagagaatgaatattcagtggttgtatgtatgtgtgtcttcatcccagcaagtgacagatgttcctgcccagttggaaaatggaaattctgacttcattgtcttatcattccttccagaacaagcaccatgggctcaaaccctccctggctctgctttaagggaaataatattgtgtctgtgcagaggccctgtctgcacagggtcgtggtagggctggccttcacatggtggcccatgccactgctgtagcttagccatgaggaagagattggtgagcctgctggagaggaaggctacccttacttggtgctcctcctttatccatagacatgagtactcagattttcgcatctagctttcaaggggctggagattaaagatccaatccatactccttggatgcccttttgtcaagataatcccttcttctgtagctcctaagccctctaaggtctgagggccaagctgccccatggcaggaatggcaaaatgtagctgtcctctcagtggcaaaaggtaataggattatcaagtagcaaaacagaagccaagaaaagacaggagagttagaggtctggattgtgcaccagccttggagcctcgcatctctagcagggcactcttaagcgttaggctttggagtttgaagaggagataaacctatcaaattgccaggtgttcccctgcccttgatgcatgcaaatgattgttgacagccagtgtgatggtagatgtgcctcctggaagaaataaaagtataatattccaacaatcaagcagcattgtggcttttttctacaatcagaaacatagcagctttgtgcttgatctcctaagcaagataattttttttaacctgggcattctttgagttctcagtttcgaggtgatggggagcaaaaatgatgcccaagttcaaatggcgtactgctgcagataggctgtctcctggcacacagatttacagagtgaatgaaatctctcattattggtgctaatctttaaccatggtttttaacttacaagttggaggctaattacacagttaccagttaaagccaggtgacctcatttgttgacaacagtgcacagcaaaggaaagaggagaggataaggaaaatatctgtgatttgctcccagaaggacagtgaagctgagcatccatttgagcagagtcctctgagtactggccttggtcagagcttgttggtgggagtgtgctaaggggagatgcctaggtctgtcattggagtaagctgagggtttggatgcaggggaactcaggcagctctgagccacagggtggtagatgggagggattcacagtggcgcacagtctcttccataaatggaaacgtaagaatcggggcacatggccatggcggctcatgcctgtagtcctagtgctactttaggaggccgaggtaggcggatcacctgaggtcagtttgagaccagcatggccaacatggtgaaaccccatctctactaaaaatacaaaaattagccaggcgtagtggcgggtgcctgtaatcccagctactcgggaggctgaggcaggagaatcacttgaacctgggaggcagaggttgcagtgagccgagattgcctgggcaacaagagcaagactccaactcaaaaaaaatgggcacataatggatggaacattctgtcccaagggatgagggagctgtatatctacctattccagctgccttgggattagccactggtagtcattccacctcactcccagactgaaaagagtcaatcacttcatgaagtggggctatccgaagggaccacaggggacctgattatactgacagatttatttttatttatttactttttttgagacagagtctccctctgttgcccaggccggagtgcagtggcacgatcttggctcactgcagcctcagcctcctgggttcaagcagttcttctgcctcagcctctggagtagctgggactacaggcacgtgctactgtgcctggctaaatttttttgtatttttgttaaagatggggtttcactatgttggccaggcgtgtctcaaactcccgacctcgtgatccacccgccttggcctcccaaaagggctgggattttgagccacctcacctggccttttttttcttggagatggagtctcactctgtctcccaggctggagtgcagtggcacaatcttggctcactgcaaactccaccccccaagttcaagccattctcctgcctccgcctgtggagcagctgggattacaggcgtgcaccaccacgcctggctaatttttgtatttttagtagagacaaggtttcaccatgttggccaggctggtctcaaactcctgacctcaagtgacgcacccacctcaggctcccaaagtgctgggattacaggagtgagccactgcacccggccatattgacagatcttttagtctgaattgttatcagccagtgtggtctagtcatgacatatctagctccatctcgagacctcatgtcttactgctgacactacatcctcgctggtactttttcttccttggcttcaggggcattgctgtgtaggctcagatccatgccagatggggtgtgtagggggaaaagctgcataagggaggaatgtcacttggcaacactcaacaagggggaatgggcctgcagtattctcccagagatgaatgagcagcccattctaggaaatatccctttgaaggaatatcttctctatggtacatccaaacttttctctggaaaacatgcctcttcattctgatgactttctatttattctcttcatcttaccatggttttacaaaagaggaattttaacatactcattcagcagagttaaggacctcctctcttctgcgaacggggagaggtataacaaatatagtaaaacaagaacagccactgcccacgttgtaggggtaagtaccctgcccaacctgcagacagtaaatgccacacacagctctaacagtgacagggggagaaaaacgtcttcagttactggcctgaccttagaggtaaagcaacatattaacagagagggtctgattttaaactttgagctgaacatacttctatagtatcttaattctcagtttttaaaaaattacatcatctagaatggcgtcgtccttgctcttccttttttcttgtgccaaataatagccccctttggtatatgttattgttttaattgattctcaaacctctccttaacattttaacaaacataaaatttgatagaaatgggctagactaaattcagcagtccaggaaatcgagtatttttctacacagatttgagtgtcacccaagatacagtatactttgctgaatctccctccatgatactcttgtggttttatctattttaccaaaacacttccacgtaaaacaggcttccgttgactctgtttgtcctttatggacccaacaggggaggaaaaaataccattgcactgggtttatccacttactgtggagttggggaaccagaaacaaccactggacacgttgcaagcgcgtcaaggtttccaccgccacctggtggctagatggagcacagcatctgtgtaactggtgggcaaaggcgttctgctccaagatgtcaaagtgggggagaaaattatgggtgttctgcaatcttggcaaaagaagagtactgtactccttatctttttactgcttctccatgttcacccttaaaagattgatttttattttttactcagctctcctcttgtttttcaggttgacgccgctgtcaccccagaggagcgccacctgtccaagatgcagcagaacggctacgaaaatccaacctacaagttctttgagcagatgcagaactagacccccgccacagcagcctctgaagttggacagcaaaaccattgcttcactacccatcggtgtccatttatagaataatgtgggaagaaacaaacccgttttatgatttactcattatcgccttttgacagctgtgctgtaacacaagtagatgcctgaacttgaattaatccacacatcagtaatgtattctatctctctttacattttggtctctatactacattattaatgggttttgtgtactgtaaagaatttagctgtatcaaactagtgcatgaatagattctctcctgattatttatcacatagccccttagccagttgtatattattcttgtggtttgtgacccaattaagtcctactttacatatgctttaagaatcgatgggggatgcttcatgtgaacgtgggagttcagctgcttctcttgcctaagtattcctttcctgatcactatgcattttaaagttaaacatttttaagtatttcagatgctttagagagattttttttccatgactgcattttactgtacagattgctgcttctgctatatttgtgatataggaattaagaggatacacacgtttgtttcttcgtgcctgttttatgtgcacacattaggcattgagacttcaagcttttctttttttgtccacgtatctttgggtctttgataaagaaaagaatccctgttcattgtaagcacttttacggggcgggtggggaggggtgctctgctggtcttcaattaccaagaattctccaaaacaattttctgcaggatgattgtacagaatcattgcttatgacatgatcgctttctacactgtattacataaataaattaaataaaataaccccgggcaagacttttctttgaaggatgactacagacattaaataatcgaagtaattttgggtggggagaagaggcagattcaattttctttaaccagtctgaagtttcatttatgatacaaaagaagatgaaaatggaagtggcaatataaggggatgaggaaggcatgcctggacaaacccttcttttaagatgtgtcttcaatttgtataaaatggtgttttcatgtaaataaatacattcttggaggagcaccattgtgctggtgtgaatgattccatagtaacaatcttgaccatttactgacgtacagaccagtgagaagtcttcgcatgttgggtacccacacctgttgtgtcttaattgcaagtctgagtaggaagttggggccaacatgtgtctcccagtgctgggaaaatatttcatagacctaatttacagtctttacttgatctaaaacattttgctgccatattttggccctcaagtttgtcccaaatgagagacaaagggaaaagttccagggaaataaaaattaagacagctgattatctgtaaagcatggtttctcatcctgaacgctactaacattttgcagggaataattccttgttgaagggagttgtcctgaccagtgtaggatatttatttattttatttatgttttttgagagtctcgctctgtcacccaggctggagtgcagtggcacaatctcggctcactgcactccagcctgggagacagacgagactccgtctcaataaataaataaataaataaataaataaataaaaggagggcctggcacgaatgacatgcagggaaggcagtgagcaggtggaggtccctgtactcgttgtggtgccttatctaccaggcggttgagttgacgtctttgtggacagaattcgattacaaaggtgtccgaaagtctccaggtgggggagagttttgtagcgggcataatttgggttgtaaattgactgttgtctcctgagcagtctcctggtgagggagagtttcactggagctttgaaacacatgttagacagccttgccctgtagggagtgtctcgtgaaggagaggtaaacaattataattgcatttctaaagggctaagtaggacatgggaaactggaaaatggagaaaagaagagaaaaaaatagtaactcattctctttttcttagaaaaatgaggatacttggtcacatcctcacatggtgaagaataagatggtctcttcatttcccttcaacactagtcccatcgtgaggctctgccctcatgacctaatctaatcctaactgcctcccaaaggtcccacctccacatcccattattggggattagggtttcaacatagggatttgggggaaacacaaacactcagttcatagtgatatctgactgcgattccaaaggtctgaggacacattggccctgttgtttttgctgtgttgtccttggcctcaggtgaacattttagctttagattgcaacattttaagctaaaaacactaagctagaaaattaaacttatctcgtcacattctgcatggtgaacaaactcaaaactcacctgagtgtatcttgttttcatgagaaaaaatgaccggtcatctcccttgccctgttagggacagttagacatgactgctgtatgaagatatgtacatgttaacaattcatatgtacaagctactgttccattttgcctggcccaaggggaggtagctagctagttggggtagcagggcgaattaaccctaatataatagtacatttctaatgccaccaatgaaatgaaaaccagctctcaaacatggcactatatgggatggcattccaaggccaactcagttacagtaactacagctttaactttgatcattttgttaccagaaaggggtcccaatccagaccccaagacagggttcttggatctcatgcaagaaagaattcaaggcgggtccatagaggaaaaggaaatgaagttttaaagaaagtaggaaaataaagagtggttgctccataggcagagtgaacctaagggctgctggttgcccattttattgttatttcttaattatttactaaacaagggctgaattattcatgcctccccttggtagaccatatagggtaacttcctgatgttgccatggcatttgtaaaccgtcatggctctagtgggagtgtagcagtgaggacaaccagaggtcactctcattgctatcttggttttggtgg

SEQ ID NO: 2 - DNA, 188511 bp, Homo sapiens
  ref <308>: DATABASE ACCESSION NUMBER: genbank/NG_023313.1
  ref <309>: DATABASE ENTRY DATE: 2020-11-19
  ref <313>: RELEVANT RESIDUES IN SEQ ID NO: (1)..(188511)
ttgagttacgcagggatgaaggccagacaagggtaaacagtggaaccaaaacttgagggctttttttttttttttttttgagacagggtctctctctgtcacccaggctggagtgcagtggtgcgatctcagctcactgcagccctgacctcctgggctcaagcgatcctccccactcagcctcctaagtagctgggactactggcatgtgctaccatgcctggctcatttttgtattttttgtagaggtggggtttcgacacattgcccaggctggtcttgaactcctgggttcaaacgatcctcccgccttggcctctgtaagtgctgggattaagggcataagtcactgtgcctgtctgagggaccttctaaaacttgcgctctctcacaggttttgaaacacattggaaaccaaatccctcgctaaattcatctcctagaaaagtatagaaaacaggactggacttgtgagctttgtaactgtaacattactgctaacttgtcccaatcagggcgtgagggtcaagcagatacagcatctcacctaggctaggtacctaggaagggagacagtgctggttaaggcagggctgagttgtgaaggaggtgaggcctacagccactccctttccttctttctgccctaattcccgctgttccactatacccaggacttgaaataccagctcttctcttcctaagagaggtatcagatgtggcagaaaaagggagcctgggttcaaatttatcccttactaacagtaagttagcaagcctgtttaactttaggcaaagcaaatagtcttcctttctgaatttcaatgcttaaggtctgtaaaatgggggtgacaataattctcgctttggcccacttcaaagggttgctgtgcgatggaatgagatagataatgctgttataatgttatgcaaatgtaaatcactgctatgcaaaataacttactgctatttccagaaactcctctttggatttaatttaatcaagagtgagaatataagttacttattctatgctctgggtgcatttgtattttaaacctcatcaattatcttggacgctttcctaactgaagtagattttggcaacagcaggagaaggagttatttctttgggggcaggcgggtatttctattttgcctgagctggtgaggtcaatggtagttatttggccaaagtaacatggaagagggaacaatgtttaccatcctaagggcagggaagtcccttttctgctttaatgactctggtctggttgcgtgactcagagaggcctgctttgggggagaaaacgaggtgggaagcagatggtggtaagaaaagatctgagattcaactacattggccccttaaccaaccattgccaccaggacaaaggtggtgtcacttctcaccttcatttaaatgcatgcatcctataaatatcattgagtgccaccatgtgccaagagtatgctgggcactgggcgtctagacttgaatgagatagactggttttgtcattctgctgcttgtagattaagaggaagatggagattaagcaagtgaccagagaggaagtatcaaaggctacaggggactagagccttagagtgagggctgtaacctagcctaggtgcctaaggaggctgctctgaaacctgaaggctgaatagaagttggccagccaggaggtgagcatgtgagaaggccacaggaagagaaagaacagaaagaagtcaaattaggctttggggagttttttcctcttcgtggctgtccttgctgctattttaaacatgactccacctggataaaaatgtaggacactgtgacctctgtgtgtttgtcctctacctccatctccagtggcctaagatgggcagtaggacagaggagggcagtttaaagtctgacaacaggcttaagactgttttatacacagctgtgagtctatcattacatttccgtgcatgttgattttcgtcatgatgctgggcagcatccgagcaaggccatgcaagatgggacagagggggatatggtactgtcttccatcctgcaccccaactttgatgttacttcagagggatagaggaagtggtagcttgtttacaacccagagctggttttgaagctgagaggaacacctcactcatattgcacgattcagctctaactcctgtcctgggtgaccttgcctgtggctgctcctatctcacaacccagtgggggtcctgaaggtttgggagtggtcagggctgaaaggtgtcttttcatttaacttatgaagaaatcgtaagagacaagatgatcaagacaaaaaattacataataatttggttgcaaagccaggactagaatctatgtttctaatgccacctgcatgcactatttctctctggaggccttcacacaaatttgcacagctattttatatacttacctcatctgatactctcagcagtcctgtgagattggtagggattaagatctctattttacagatgagaaaactgaagctctgaggaggtttggccaagtccccacagctagaaagtcaaccttctgactcagaattcagcgtgtcttccactgcgttctgtagttgtgcagcaggcacagtcttggggggttgctgattatctacctgagaatggtttggaatgtagataatgattagataggagggcttgcaaggagttaattaaccatgtttgaatattcttaccaattctctagcattcaagttgcaaatcaacatcaaaatgagcaagtagctggccctgccctactagtccttctgtgcaaggggccatctgaaccttaagccagcagtttgtgtgggcaaacagatgcccatcttcaaatccacacttaggagactcctgtctctgttttctgctgggactctgacacttgctcttgcagagaaggttctcattaaatatatgttggaaaaaccccaataattgaatcatctacaggatgttctcactttagccatattcccttcattttcctttgagggctaaatgggagtagagatatctttgctgctggtcctgagagaccatggggttgtccattcctggtaaggtgatgctgaccagacagagctgatctagatgaggggtgggaggtgacagtggttcagtggctttcttggaggatgcatgattgtttgaattattatttttaattgacatatataagtatataataaatatatatgttatatatatgagttagagctgaattgcacaatatgagcaaggcgttcctctcagcttcaaaaccagctctgggttgtaaacaagctaccacttcctcaatccctctgaaataacatcaaagttggggtgcaggatgaaggcaccccaataataccacactggggaaagtgtggtattttgatacctgtatacaatgtataatgaacaaagcagggtggttaacatagagaatgcatgatttgcttggtggggagaactggatggttctgtaattatgttgagatggacagaaagacatcatctgacttggggagaaaatcgggtgtgggaggaggtgggagagtgcagaacctgaggcagaggtccccagcaagtctggcatggggtagggtagggtggttgaatactggcttcagggagatgaggcaagctggcctgactctggcaggttgtcagtggtagtcctaggtagaggagggggctttgctaagctacctgaaaagtactagagtgggccggggtaggaatcgggctaccgtggcttgtcggagatgaggaatgtttttagaaaattgaactgaccatcccttccttcccctgaacagcagcttgtatgcaactataaaggtagtctccctttcagccctgcttgctgtgtctttattcttatcaaaaaccaggatctgagttcagagggcagtgaaacataaaatgaaataggaaaggttgcagtagtacatagactttggctgctcccactaacctgcaaaaaaaatattttccttgggcgtaccttagcagttccatggcagaagttttatctcctgtggttcagagagtttggctcgtcaagctgaatgtagggttaaagtgtgtcctccctcctctgtgggtgtttgcctagctcctggctgtgggttgaagggactggtaaatatgtctattttactgctgaggcagggtggctcagtgcttggtcaccttggagggatcataagcaagccgccgctggggccctgtgccacgcacaggtattcatgcgtgcgtgcaagcacaccctgtatagctgtgtaataattgtccaggtgtggtgcattctttgtcagatgtacccttgtttttactgcctctgtgcaggatgtttatttgctgtgcttcaggctggggcacgtagcttgatcaagggtagtttttgctgtggcccctgcaaatacgttgtggtgcccagagtagatgaaaaactgtgagtttcccaatagagcgggttcatctggactcttgttggttgcgttctaggagctaattctgtggctctggactcttccctggaggtggggatgaggccggggccggggggaggtggtcttgtggcgctactgcgggctgtgcactcaggaaagtggccacggtttaggacgacctcgacacgaccctgtataggacgcaactaactccagagaaaacgagcgagccccatgcaactcttcattcctgcagggagaacaaggaggtgtgcccgccagggaagggacgcacccccaccggcgctcgctgccttaacttccccatccccgcgccagggaggggccggagtcgccgccgaggccgccgagcgcagaaagtgcgcgaaagggacgcgctgcgagcctcacacgtgacggcgccgcgccgaaccgagcgggacctggcggcagcggcggcgggcgcagcggggcggcccggagcggcgcgggcggcctggagccccgggagcggcgcgcgcggtcccggcccagcggctctcctggcctcgcgctgcacattctctcctggcggcggcgccacctgcagtagcgttcgcccgaacatggcgacacggagcagcaggagggagtcgcgactcccgttcctattcaccctggtcgcactgctgccgcccggagctctctgcgaagtctggacgcagaggctgcacggcggcagcgcgcccttgccccaggaccggggcttcctcgtggtgcagggcgacccgcgcgagctgcggctgtgggcgcgcggggatgccaggggggcgagccgcgcggacgagaagccgctccggaggaaacggagcgctgccctgcagcccgagcccatcaaggtgtacggacaggtgagcagttttgcaacccgcctccctccagttttttcctctccctgcacttcctcacccccgcatccatccgttgcagtcgcctcctaggtgcaggcaccactggggacttcccggcttgcatttgtttttttccttcacgagtacaaccgtcagcacttgaatcgcattgatctttccttcttcctgtcgatttagtaaacgtattccaggtaactcgccgggtgcagtgcgtattaccccagggtgtgtgcagagagatgtagtttccggcaggtataggaggggtgcagcttcattttacatctggataaaaaacgggctttctttagtgtatcatcagttggcagtggaggcgagcaccctgcagttgcggtacacttacacagaacagcacgaggtgggggtttccacacttagcattattagcacaataaaagtgggcaaacctgaaagcttgtcgactatctctgtacagtcagacaagaggtgtgtgtatgtgtgtgcgtgtgtaaaggctgaatttttaatttttaatttttggcgagcgtgtgagatgctctccattccttcttccccacccttcaagatgctgactctcccacccccgtcaagataactttattttggagaggaatacccctcatggcacttggagatttgaaaggactgcaggaaatttggtgggcattattattctataagtgatttatttctacccaggcaataggtttattagatcataagtaacgtgaatttcacttttatggtcagacttactgcgaggaattgcagatggagtttgtaggttaggatcagcactggcaaaattaatttgaccgtgttattgcctcatgagactcccagtcctgcagttaagattgacatcagcaaaagtataaggtcggtgggggagaaaaagtaggaccagaggagggggtaaatacacttgttttctagagtcaaattgttccttttgaagtagaaattattaataaaagattaccctgagttctgccttttctcactaatttcactttagccatttcttcaggaaatacagagttaaatgttcaacccttggatccaggacgaaccttgtaaacatatcaccctattgtgtcattttgttggtgaagaaactgaagcgtggaatggtgaagtgactagtccaaggtcataccgggaaggtggcctgctctctagtttttgtctgcattgtctcagtgacctttgcttgactgcagtcaccctgtctttatgcaatgctgctgaaatacctcctttctaaaataaaatagatctggtataaagggggaaaggatggtggtgactgggtgggagcgttggatttccctccactattggtccctgggcaagaatgtgtgccccagggcatgtaactaatggtggccacaggctgcaggaacctgcatgctcagttcctcttgggcccagatccttgtccccctgtccccaccccatatgacaaatatgtgtatgaacaaaaagaagtcatcaaggtccttgctcttaacagcgacaccagcatggggctgatggagggtgggagaaggaggaggagtggcccacttcttcattgggcctccgcagtcagcccagctctgctgtgctcttgaatcagcattctgggaactgggagttgggggctggtgggagacaatccctcccagtgctcaggtcccctgaagctatagtttaggttgaggaaaaagttttctggtttcaaaaatatgtgtacatgtgccatttctttcttgggtttggtttatgaaaagctccaggggatgtggggcaggttggacatgaactctgttctcactgggagtgactcccaaaccctgggcttttgagtttctgggccagccagattgagtttggttcagctgaaggatggagaactagcagtcaaactcataatgaggaattcctaaccggagggtgagggtacaagggtgagatttttcttctctgtggctgccttcctatgccattgttgcctcttgctctgaggttaataagaagtggaattaatttgaatctgtaaggatttgagtcagataaaaggaagaacttccctgtactgggctttctgccacaagttctatctggtgcagacccttcagaatgcaagcacaggttggtgactgaaggggtttgaggtgcccctcttggaactctggagtaactaacatctatttggaatgatctttctagcaaggatgaccattgcctctgtgtttccctggggcagacctggtttctaagttgtctctggtggttatgaatagcacccccttcactctcaaaagtgtcaagatgtgacaataaattatatggtcctacttttagccttaagccaagttccactttgtaatcacgactttccccttcaacgtttaaacctaaggaatggtgatgttttccaacagtactgcttgacttgagtgtggttctatggaggtgcagtgagctggggaataaaatttcattcctgcttttaggaaatttacaatttaaggaggagagcaagcagatgcagatacaggcatgtcaatgtaccaggatgggaaccaggaaacatggtcacaagaaaccagccacaactctacaatggtgtgataacgggctgtgtgacatgcagcgcatgggagatggagagataaggggtggtgggctcagacactgtccagcttcttgccctctgacctttgagtgaggttaagaggacactggcagcacaggttagggctggaagcagaagctgcctgaaggaagcaggcctagaggcgatgttaaggccaccaccttcagggagaagagaagggaaggctttctaggggaatacttgcatctgagaaagagccctgtgctggagtcaatgtcggtcctttttcctctgcttcgctaatgtcttgggtaaactaggcttggttattttgaccattttcctcctcagtttctctaaggtggggagaccggcttctgccatgattacttaaaggcacatttatgatactgaaatgtgattgtaggggtgaaaataatttgctggcagatatcaggacttttctgcccatgttcaaggctcacgcctgtaatcccagcactgtgggaggccgaggcgggtggatcacttgaggtcaggagttcgaaaccagcctggtccacatggggaaaccccgtctctactaaaactacaaaaattcactgggcgtggtggcagatgcctgtagtcctggctactcaagaggctgaggcaggagaatcgcttgaaccccggaggcggaggttgcagtgagccgagatcgcgccattgcactccagcctgggggacagagtgagactccatctaaaaaaaaaaaaaaaaaaggcaaagtttagaagttgagccccttcttaaaggccaggtccaagaagagggattccctaattcatgccacactgaatttcctcctgatttctcataagctctgtctgtctgcgccatcatacctgctttttcctctgcctgaaatgatcttccccaactcttgtccttgcctgggaagctcttattccattctttaacatccaaggaatacctcttggtattctcaggctatggtgggaagagtttcttctgagcttggaggcagcacttactgccttgtgttagaattgctcaactgtctcatcttcctgtttgctccttgagggcatggatcaagttctcttgtgtttccctggcacttgggaggcccttaatgagtatttgtggaccagccacacacctggaagaagagaggcccagagggtaggaagcacattcacattatataaaatgtatttgtaaggaggaatacagtgaacccacacatggatagtgaaaatgagatggctcattcggtagtgaggatgcaagcggcatggcctacagatagtggagccctgatttgcctgtgctatatgggagttattttcaatgaagagcttggattctattttacagaatcctcccttttagggctatcattctggtttatgctaatggtattgttttggggaaaaatcctttggaataaagcacaaagcctaacaggatttacaggtttattttccttccaacaagctctctcttcataattcctacattttagaagccagggagtattcagtgtcctgatttgagactgaaaataaagtgtctattacagcacaaggccctgggacaaaaggcctcctttgggggtggaataccgttcagctttagatctcttttgagtagattcttccatgatacacttgcttgggaaagaattggctggttgattctgaagttaggatgtttgacctgtgtgcttccagaataagatgagaaggcaaagaatgtgctgcttcaggttggcttttatgtagctgaagagttgctcggggccttgggttggctcaataagggacgtgaccttgaaaagctcttcctggttccacttggcgtcttttcttagggagctctgtgcccagtctctggccgcttttagttcataaatagcttgcatggttagaggcacagaaggtggaggctttgcgagggggaaggaatggaggaaaggggttggtgagaagagtaaggaggcggaatttggagggatgaaataaaaagctgtctgattaggtaatgcacgtttacaaaacaaaatttgtacaaaagcgtatgtggtaacaaatttccttccctctcatgccccctgttcacccagagctcctttccgggtggcatccgttgttatcaatatttttgtatatctttccagaaacagtctatgcatgtacaacatgtatgtacataaaattggaaacttgaattataaatggcttcctgttacctgtagtccctggtatcctgaataatgagattaactttagctctaaattatatttgtgatattatgatggtgaattgttagaaaattacctgaagtatcataatataaaatagatgattactttttttccaggccaggtgagaaaaacctcattctcctttcacttcaagcgttcttgcagagcaggagagcagcctgatgtagcccccttgtaacttggagagatgctggagcacagttcccttgagatgtggagtccaggcttgtaagagcatcagaatacagtgatcatggatcttggttttaatttgtgttctgtctgagaatgttttctctatgttctgtaaaatgaagttaatggtatgcttaataaattgctttgagacttgggatccacgaggcagatccttatagcaacgaacatcccaaggcaaaaggtggatgttgtaggaacatttcattgtcagattttggtctgttcctccttagagatgacagccatcttcatagtgtcattgttgaatcccagggcagagatagttggagccagctttgttccacccactgtaatggagggacacagggggcagtcttatcataatctggagagcaggtaatccaaaaaataatcgatttgcttttgctatgtatttatgtagtcttttttttaaagcattcgtttaccttcctaattaagttttgctcaggtgaatattaaaatgagtttgcattctttgatctattgataagggaaatggctggcctaaatgtattcagggaaaggcagtttggagtttagaatttgcgacaataattcagatgcagataattgagagttgataaaaatgtattaaatgttttaaatgaataaaaatgtattaaaacctgggggcattacattgacctttcctccatttatttggatttaaataaatgtgatggaaagtaaaagagagctcactgcatttttggtttgaatattcagggattagtatttctccagaggtggtctgggctgtgggggtgaggcattctctgttgatgagcatgggactttcctatgcattttctaggtatgccagacactgttggcagatggtatagtcagtctagccacgtacatgcaaaaatcaatttccctcaatttaaaatgagccacagttaatttcgacctaatttattggcttatcgacctgtgaaccctgggccttcgaagaagtggcatgggcggccttcaagcgctgaagtggctgatgaagctaaaatccagaaaaggcagggtgggctgctgagcaagatcaagatttgagtttcctcctgtgttattgtgagatgctcagttttttttaactgtaacatgaccaatgctttgtgcattttatggtgggttccgtaaaaataggactgcgtaacgatcacaagtacactagtgtgttaaaaaataattacaaagttctgttatccactgggtaactgtttattataatggtaacatccatgcccatagcactgctactagccaagagctggaagatcctatcttcctggccgcgtcctggaccctccgatgtggcactgttcaatagatctttctgtgatagtgatgttttctatctgtgctgttcaccatgttcactagtcagatctggccattgagcaggtgaaatgtggcaagtgtgactgaagacttgaagtgtctttcatttaattttaacgaatttaaagttgaaatagccacatgtggctcttggctactgtgtagacagcacaagctttgacaaggcctcttcttcccacctgtaggcaacctctgcttcacccaagagagaagttcctgcaaagacctgctcgtgtaggcagggcaaacagggcaataaaagcaagagtggagggcttgggtctagaccctaggtattggtggctgctgactgccaagttgagtgtcaggagacagtggtccttctttcctaggtaggaactcaccagggggaccgtggagggccaagtgggtccggtggttggctctagggcatgcctctgcacagttgcctccttctgtcagtcacttagtcaatgaaggctggctattcatagggtgaaccagatctctgtggcttcacttctcatctggccttgcgcaaacactgcacttgtatcgggctttgctaaggtggagcgcagaccctgcacgttctgtttagcaatgaaagatgtaaacagtgccttaacagtggggccatctccctgccctgccctttgcttcctgtgcttttgttgacttaccttgatgtagctgggtctgtctttcttcccttcaaccctccagattggcatgaagacaaacactacaggcgtgtggtcttcatctttgcatataaacctcccccacttcttggctgaccttttaacttagcttgccattgctgttgctgctgctgcaggctcttagcttggaaaatcaggacccttcacaatgatttatctccagtcccctgaattagattcaaaacacagctacgaattctcagaaaggcaggctgatgtgattatatcccaaatctgagtggctgacaaggacaataaaaagatgtacctatatcaaatgcatttgtgccgtgtagagaccaatatgttgtttattatctccccccctttctgggggttttttaaatgaagaaggtaactgatgtgacctctattatttagaagagagactagcctgttgagtagaaaccctgggggaagatgactagggtgaatcttacatgaaataaatgtgggggtgaatcaatgggtgggccctcagttgggattttaatattttagggatactgagatgatttccttctgactttggggggctggtgagctgaggtgtagtgtcatgatgaattttttttttttttttttttgagacagagtctcgctccgtcacccagctggagtgcagtggctctatctcggctcactgcaacctctgcctcccaggttcaggcgattcttgtgcctcagcctcctgagtagctgggattacaggtgcgcaccaccacgcccggctaattgttttgtatttttagtagagatgaggtttcaccatattggccaggctggtctcgaactcctgacctcgtgattcacccaccttggcctcccaaaatgctgggattacaggtgtgagccaccgtgcctggccttggtgaaatttttaactctgtgcccagaggcattggaaaggctggtatgatctggttgagcctggagggccctgggttaagagccacctgtggagaaaggctagcttggggactgtggctgggaagactttaataggtacctgtgagatagcaagctatagggttaaggtcccagatagttaaggaccccatttctctattagcccaggagacacatgcgagacagttccacctgtctctgccccagggacctggggagaaaggccagtgctgatctgcccaaggatctcagccaaggagcccgagatggcagggagtggggacagagcagagtggggtgagtgtcctgtgaaaccagaagtgtttggaaggacttgcatgctttgaacctgtgctcaattaattgagtaacctgagactctgtacctatgacttacctcatctgtgtacatttagttccctgaaattctctcactgagtggttaaaaaaaaaaaaaatctgcagttaactgtgcacatggtttgctgaatttggcaaggtgtgctgttggtggtggtggtgatgggtgggctggagggggacggttactgcagaaacaaggccttcaatctctagaggagaaaaatgaagcagtggatgtggaaagttggttagaggtgaaagagctatctaaacagagctgggggagtttagctagcagaccagagcctgtgggacgtccgcctgttgcctcacctcctggtagcccagagggcatctcctattactgagaaattggccaagccatgggtttaatgcactcccccttctccattagtcttgtttatagctgccctcacagggtggtgaagaagccactggtagggtatagaggccttcggttctgggatgtaatgtttacatgcttttctcttggagttaggaaagtgctagaaaacagtgtcgcctctgggctggagccttgggacctggaggttgggtttccccaggtttcagagttcggctgggaatcaaggagaaaactgcctgtgagtttcagttaggcaggagctcctagcttgactcaggcgtgcagtgttttgtcattttatatatgtcatcgcttgctcttaggcctttcgctaatgttaatgttctatgtggagccgttttgtgaggaatggcttattttggttgagaggcatttggtaatgaaaagaaatgatgttttagtgcgtcgaagtttatgaaatgacatccacaggctgcatctcatttgattcttacgacaatcttgaaaaatggggaagataagaatgattattcatctcatttcagagatgagtatcttgaagcttgaaaaggtgaagtgacttacccgtagttagacaggtggtaaaccggagagaacaagactcaaaccaacccgctaacttgtttcagatttatgcaggcatatttgtctatcctaagtaatctagtgaaatttttgatctcaagcagggatccacagcttttttgcagtacttttttttctccacctttaaaacctggagatctcacataattccactttctcctggccacactgatcttgtaatttttcaaacacagcaagtctcaaggcccttctccttcctggcttctgctctgccctgccttaggtctgggtccatgttctctgcctcacttttccatccccttttccctaactcctccctcttcatccttatggtgtcagtacataggtcaggtcttcagtgaagcctcactctctccccgatatgaggttaggtcccctgtgtaacaacagtaattcaatcatcattcctggaattagttgtttaatgcgtgttttccctactatattcagagctatgaggcaggacctagaatcgtgttatttttctttcttttttattttttgagacagggtctagctctgtcgcccaggctggagtgcagtggcatgatcatagctcactgcggcctcgatctcttgggcacaagcgatcctcccacctcagactccctagtagctgggactacaggcatgcgccaccaggcccgtctagtttttgtattttttgtagagatggggttgtgtcatgttgtctaggctggtcttgaactcctgggctcgagggatccacccgccttggcctcccaaagtgctgggattgcagatgtgagtctgccattttactaacacctagtatagcatctggtatatagttagtgcttgataaatacttattgactgaacgcggtgaggggctattcatggtgaagctgcagagggcaagtctgtggtctggaaccatcctgaagagctgtgagaaatgactttgggctcacagggaaatcctcacgtagggcaagtcctggcttggggtgcgctctcttgagggggtatttgctgtgctcactctgactgtgtttcctgcacatggccgtgtgttttcaggcagtgagaaccaccacattgccttaaagtctgtctctgagcttaatctcatttgcaaaaggtggcatttcatttaattgttctctgagattctttctggctttgatattttcctcattttttttttgccaactggtaaattaaggggtgatattatgttcatgagaaagagagttttccacagtttctttttagtagggagcccctcccaaaacagcaaagcatattcgctcattgacaaagtgggttcaccaggacagagtggcacacagaggtaaacagtagataggttctcgctgccaaggatcaatcagaaagggaaataagctctctaaactgatattataaggcagtgagattatgattatcatccttttagcaaagagaaaggaaagggcatatgtgtatttttctctgtagaatggtcatggctccagtgaaggagatagtagtgaatgctaagttctagtccaaggttattctctccttgtttcctcatctggaaaatgggcagcctgaattcatcagcaaagtagttcaggagttctgtaggtgaagcatcttgagcaaactcaaaagtcaagtgagtgagctgagattccatgaactgggcctctcttccgggagtgctcgtaaactagatttcagctttccttctgaggtgagcagtccagggaggataataagcctgctaaatatagtgagaacacagtcttgaaaggggacagtgagaggcaatttgcatacctagcatttaagccatgcaaagggatggtttgggaaaaccttgttctccttggacctcaggaggctgtctttgacttcctcagtttcgtcatatagttcaggggagtgcctggctccttctgtcctcacagttgaaggacaggatatttgttttatgctatattgtagaattttaaaaacgcttctttgtatttcactgctagtgaagcagagaaatgaatcagactgccttatttgtcctccttgtactgcgttttgggaggaggctgtgtaggagttgtgaggactgcaagctgtgggagtctaggacatcctgatttttgggtttgaccaatttgaaagaggtgtagagagggtacctgtgacccattctattcagtggccccacctcctgcataagcctcaacaactatacagatttcggtggttttattggaaacttctcatcattggcttagacttgcaaccctaattcccccagaagtgctctgtgtgagctaacaggtaagaaatgattaaagagcctacagggtgcctggcacctagcagacctcagtgcctacttcatccgcaagtgaacgcatgagtaatcagtcccttcatccaagccattgacttcctcccctctatttataacaacccagaacttgaggactgggtggtagcaggtccttcccctcactctgaataataggaggtgaatcatttcacctctccgggttgccagggcacgcagggggctgagggacaacacttgtggggtgatatggacttgttcgatgaagatgccgaggcgagtcaaggtgtgggtggcatccactgttgtgagctggcggtggatgctagccttgggcctgcggctgtttctccagctggggacagggaggcctgtgcggatgctgtggctctgcagatgccgctgacagcactttgaaggattggtttggccagagacccagtccacagcctgcctcctgtatgactcattctagctgcatattttggtagcatgagggcttgagatgagataaaaggagcacttcttaagagtggaagctcctaggttcttgattagcacttgagaaatataatgttctctgcaggtcctagaggccttaaaaaaatttgagtatatttcacattacataaaattagccattttaaagtgaacagttcagtgaacttaatatcgccgcaatgttgtgctaccatgatttccaaaacatttccatcgctctgaaataaaaccccttacccattaagcagtgattccctcctctccaatctcccagcccctcgtaaccactaatcagctttctctccctatggatttacctattcgggacatttcatataaatggtgtcatgcaatcatgcaatatgtgaccttttgtatctggcttctttcacttagcatattgtttgtgaggttcagccacattgtagcatatatcatcagtatatcctagagttttaatgaccatcccaaatccccaaagacaagcccccccgccaaaaatggtacatctttctagctaccgtcatttagttccaactcctgccaggaggcaggggaatcaactagattcattgtttcccaaagaagctgcattagaaatacctggggttggggtgtgtctcctttttttttttttgagacggagtctcgctctgtcgcccaggctggagtgcagtggcatgatcttggcttactgcaacctctgcctcccagattcaagcaattctcctgcctcagcttcccgagtagctgggactacaggcacgtgccaccgtgcctggctaattttttgtatttttagtagagacggtttttcactgtgttagccaggttggtctccatctcctgacctcgtgatctgcctgccttggcctcccaaagtgctgggattacaggcatgaaccaccacgcccggctgggtgtgtcttttaaaaaagactgattcctgggctccaggcagagggcgacagagccggtaggcgtggagtggggcctcttaggtgattctgaccttcagtggggcatgggacccccctaggccaggtgatctttggggggtggggtgggaggagttatcttgactcttaacgacctgccaatgagccagatgctgtttgttgtttatgatgcagtttctgtgttcagaggtttctgtggcatgtaatttttctctgtttgccttctgaggggaggcactcggcccctccctgctgccttaacagctccaattaattgtgtctcatttatcaagctccagctatgccctgtgagctagacaggggagagggaaggttgttcacaccccggggttgtggttatagctgattgcacgtcaaggttatgttcctgggaaaaccaccctcccacccactcccaggccagtgtcttctgggtgtgggacctgtgtgggggattggcgatggaaaaaggcttggggaggaggaaaggggagatcagggggagatccttggggatggatggaaaaggaaccaaacaaaccggaagccactgattaagtaaagggatctagggacctgtgggttgttcttgattgctggggtctgccctgggctgctggtgtcttggccacatgccatggagagctagcaggaaaagcctgctttgttgacttcttttctttcccctgggggtgaggatgggggcaaggtggagacagaggagacaggtgaggccagagggtagaatgcatgtcttgataataaaatttacttcctgtcagcctgcctgctggctcccctgtcctgcgcgcatccattcctgattcctgcaactaggtctgctgtggggggatgggcacccgggctgccttggggatcagctgtgactcaccagggagttattcttatgaccaggatgtgcctgacatctcgccaagcaaaggagctgagctgttcctgcgagtgcctggtggccctcgtacaagtcatttcttgccagggattttatccccctactgggctgccccttttcagtctgctcttatgagtaaaagggacatctaataaaaaaagctttccttaaaaaaaagaagagaaagaaacaaagtaacaaacaaacaggtgttttaccaggcttgccttctagaggttttctttttttctttttttttttttttttgaggtggagtctcgctctgttgcccaggctggactgcagtggtacaatcttggctcactgcaagctccgcctcccgggttcacgccattctcctgcctcagcctgccgagtagctgggactacaggcacccgccaccacgcccggctaattttttgtatttttagtagagaccgggtttcaccgtgttagccaggatgggagtttttctttgtagaaaagcccttggatgttttgaggcttgcccttggtgctcttctcacctttcacctgccttgggattggtgaggaggtctcctgtcctctgagtagatcgatttcagcaagttatcttcagaccttttgcccactctgatcactgaaagctttgcaacctactcaaagcattatctgagtgttacctgccagagggagcattttgatgtcatctttgaggatgcccaagttgaatatttgaggactttttatcccagatcccaggggaacatgggtgattttttttttctaggttcctagtcctttattgtattgacatttgcatagttttctatccccactctggttcaagagtgcagatgttttgggaggggaggaaacttttagctgggattcccagggcacatgtgttgtgagtttctgatctccagatggatccaggggattgggctggagaggaggaaaagggaaggcttcagcgaccggaggagattcctttagctgctttctctttgtagcattctggattaaataatttatttacttctatttcttatttgcacttctctgttagtgcttgcctggacttctctatctgggaatgaggagagacattttggaaggacacatattcctaggtccttttctttaaagtaaggtcgcctttcaaatgtttttcaaaaagagtttgatcctggatcaaattaaatgcaggtatttaaaactccaagtaacgtcgttaaggattagctgctttgtccttctgccagccaaatatgtggcacaggtgtttctcttttccctgatgacatctgagagcacctcaaggagtgggtggggaaagttcgagtgtgctggggggaggaagcgagagaaggagaaaggagctgtgggttttctgccgcagagccttgatgagaagacagctcggagggcaggttggcccaggcttgaactgtcatcagtctaggcttactcgtgggtggggtggactgtgcgggctggagtcccagaagcttgatttccttccacgtgtgcctcagacagctgaggttgaggaggctggtggaataggcttctctcagacatcgctcagcaagagaggcagcctgtgatcctggtttcatggcattgtcctgcttctgagtgttggaccacctctcagaattttttttttgagactgagtcttgctctgtcgcccagattggagtgtggtagctcaaccttggctcactgcaacctctgcctcctgagctcaagcgattcttctgcctcagcctcccgagtagctgggactacaggtgcatgccaccatgcctggctactttttgtatttttagtagagatggggtttcaccgtattggccaggcgggtcttgaactcctgacctcaggtgatctgcccgccttggcctcccaaagtgctgggattacagtcgtgggccaccgagcctgaccagctctcagaatttttgttattcctgtcatgactttgctttccacagagtgggtggaatgtatggttcaggtgttcaaatgccagtcctcagacaggtgtccatcagccaacagtgaaataagaaaataaaagtaatgtagttttccatacagtgaaacaatggttctttattctgagatgatatgcttcctcagttttcagtgttaacacatctttgaaaaaatgacaatgactctagatagtggtcatattgccctgtaaggtgagctgcgtaacagacaaatcccaaaggctcagcgtgtggctgagttgaggctccgggttatgagaagttcaggatgagtgctactggttagcggaggtcttttccatggggatgcagcctccttccgtcttcggctctgccctcctctggggctttggagtcctctgaatgcggcctgcggatggggaaagaaaagaggactgcatgggggccaggccgatagtggccctgatgacttctctcacattacacctgctggaactcagtcccaggccacaccttctgccccacagcctggaccagagtctgcggtgtcctcaggaagcagaggaaagagattgagagagtagctagtcctgtttttgtgatgtccttacttggcagaatagaagttgccaaccagtcctctgttggccttcctcatttttattttatcggtttaccaaatctaaaagtctgagaactaaaatatttccttatttgagacctttcaaaaataattttgaaaagcttcacaatgatacttctctcatttctcattaccagctgaaagtgaatgacagtaccaccaagccagaaaaaacatagttggaacagaagtttgaaaagcatgtgatctttctggcctatgaattttttttgaacaagggcaatgtttccatgctttggtttaaaatcttaccagtgcatgtcatacatagagtaaggatcagagtaaccagagattggtatcataaaggatgaaaataatcaaaggaattggttatgccaatgagagcccaagaagcttttctacaatctctttacatccaaaatagcaggggactcatttctttgtggggaagttgagtgtgacagaatatgcatgaggtgggaggggaagaggccaccttggcccaaatgctttagatggcagaatcttcatcatttctgcttgacaaaggaggaaagagtcttgatttagaatgtgtgtggccatcacttatcgtgggtcctaattcctacattgatctctttcaggttagtctgaatgattcccacaatcagatggtggtgcactgggctggagagaaaagcaacgtgatcgtggccttggcccgagatagcctggcattggcgaggcccaagagcagtgatgtaagtgttgtgttggctctgggcacaccttggtgccatcaacatgcccttttctggtccactgggattatcatactggaaaaagtagtgggtaattggaacatggaatggatgaattgtatgacagggaagataatctagaaaatgatatatcccttgtttgctgaacacagggaggtgcagtcagtgttgcaaacagatccatgcaatgtgtgattacctttgggaagtaatagcatatggactggattgttgcatctgcccaagaaaataccagagtgccttcctgggcagagctgcctgcctgcagctgagcccgatggaatcaaattggcctttcccatatgctggtttcttctaacccattatagtgggatgagctgttgaaactgattctctaatattcttaatttctatagctgggtatttgtgatctttagtaggtgaggtactttgaagactcaagatgccaagggttataaactcaaaggcctgtgggaggccgggcaggtaaaggacaggagtgaagccaccttcaagtttataacactcttttctattttttttttgagttggggtctggctctgttacccaggttggggtacagtggtgtgatcttggctcactgcaacctccgcctcctgggctcaagccatcctcccacccactcagcctccagagtagcaggaactacaggtgcacaccagcatggctggctaatttttgtgcttatatatattttttggtagagatggggttttgccacgttgcctaggctggtctcgaacccctgggctcaaacaatccgcctgcctcggcctcccaaagtgttgagactacaggcttgagccaccacacctggccattacaacactctacctcctcagagaaatatggtttctcccatttttcttgaagtctgtggccttgttggacaatatatgtcatttccacttttgatggagatgcacattcaagaaacattctcccatatcttaatttgaacatactaatggatacttggttcctgtgttggagagacgtggggaaggggaagggcctttggggaccgggagaagcatgcttccgaggagcattgactgtcagctccaggctctggttgccgtgcaggatgctgggcccagtgttgccacatcttctggttttccagaggaacccagaggtctggagtttcatgtgaaaactgctgagtcttacaagttggcagccagtgtatagtttttacagacaccgcgtgagccaggtaaaacacatgtaagggccaaagctcgcccaacggctggtcccaggtctgcggcctgtgctctggactcctccttgtgggtgagaggagcagcccctgcctcagcctggggtctgacactgtggcagcgcgaggctgcagacggaacaccatgctttacagcttcggtcaccctgcattctggccgggggaaccttctgatgaatttgccagcactttcacactagccttaaggatacatttataattcttgaatgcggatttggtctctgtgaggtccctctctgtatatccactgtctgggttgggtgtgttgagaagcaggtgttgggaagttgtctcagggactgtttccagggagttgaattagggcagccacagaagggaagacagaagggctggctgtcaggatgcatgactttgcccggggtgggttctgagccatgctgtgtgggagaccaccgctactgatggccagtctgggtgtagtgctctggggcagggctagacttgtttggggcaatgactttggcccatttataaatatgatcaggttttgcaagtaaaagctgtggccaccacagacagctgtgtctgaatgcctttggtggccgggtgtggtggcctgctcccatagccccagctactcagcaggctaaggcaggaggatcccttgagccaaggagttcaaggctgcggtgacctatcttcgtgctactgtacttcagcctgagtgacagtgagaccctctctctagaaaaaataaaacaaaaaatagaaaagaatgcctttggccctgtgagactcttcatagacacctgtgtgtagtccctgcccatgggcatatccctcctgggcacaggagatatatatactgtgctatactgtgttgagaaatccttcttggaatttttatgcgtttaaaaaaactcttaatccagacaacattttttgtgaggtagataaagaccttaagcattgttttatagttttgctggacaaacaggagccaagaggtgtaaagagacttgcatgaggtcactcagcatgtcagtgggaaggtcggggctgatgagaatcaaggcccaatcatgtactcagtgtgcgaagatgtggtattagggtgaccaacttgtctaggttttagcactaaaagccccacatcctgggatcctcccttaattctgagtgaaccagggtggtttgtcaccctaagtattgccagtctattgaaacccaactcttgctctctctgtatatttgggtgtgtctaactaagagcccattgaacatgtgaagtgggatacactattgtggaatgaaatgggagatagagccgaggtgggcagatcacctgaggtcgggagtttgagaccagcctgaccaacatggagaaaccccatttgtactaaaaatgcaaaattagctgggtgtggtggtgggtgcctgtaattccagctactcgggaggctgaggcaagagaatcgcttgaacccgggaggtggaggttgcgatgagctgagatcatgccattgcactccagcctgagcaacaagagagaaaactctgtctcaaaaaagaaaaaaaaaaaggagatagattaaatgggaaggaaacgcaatggccagggttaataaatagggatggcagaaatggccttcctctctatacaaactgtgttaaaggattggcagatgcaagtgagatgcctgatgtaaaaagttaatgtgaaaagaaatgatgactcagaggcagtagttggggtaataacaatccaaattctctttaaagaagactgagcatggtttgtaaggtcccatcagcagtccagaagggaaagaacctaaacaaatcaggaactgtgtgggtgttggtgagcggccaaagtcatgcatattcagtatctaaaaagggatggctctggaagctggaatccagaaagtcttgctctcaaacggggaaaaaatgaatcatttatccactgatgaagttgaagccagtgtgattccatgaagagaacggctcctgcaggactcatctgtcctgtgataaatcaacaaaagaattaatagatgtttatctcaccttttcctaactctttgtttctgctctctcatgatgtattttacaaagtactaggtttacaaagtgctcaggtgcaacataattggctgaagagctgtccaggggtacagtccaccagaagatcagaatcaaccaggggctgggtgaggagtggctcatgcctgtaatcctagcacttcggaaggccgaggcgggtggatcatttgaggccaggagttcaagaccagcccggccaacatggtgaaaccctgtctctactaaaaatataaaaattagccaggcgtggtggcacaagcctgtaatcccagctactcagaaggccaaggcaggagaatcacttgaatccgggaggcggaggttgcagtgagttgtgatcgtgccactgcactccaggctgggtgacagagtgagaccctgtctcaaaaaaaaaaagaaaaaaagaaaagaatcaaccagggaagatactgtgcaggataggactttctgcttttgtccctagagcagtgtgacatcatgattgtacccctcaggactgactggggagcagtgtcagttcttgctaacagagggaggccgatgtctggctgagcacaggctctgaaatcagaacacctgggctggaatcccggatgtgccattcattagcaatctgaccttgggccaggtgatgtaccttctcttgtcctcctctgtcactgacatagtgcttgttaaaccttgctacccaaagtgtggttgtggtctgtggatcagcccttggggattttctgggagctggttagaaaagaatctcaggtcccatccggacttcttgaatcagaacctgcacttgaccagtgtcttgccggggccagggggcaggtagggggcggagagggggcagtctgtgggcatattacagtttgagaacattgctgtaaagtacttagaacagtgccagatatggggatgttttctgtacattttagctgtcatctgtttctcccctttctctccctcctctttattattacgtagttttgaggtacaagggaaagaattaaaaatcactcactttcaaggaccatctttgtaggtaaaaaaggatctaaccagaaaccgtgggcagttcagtaactcctcccctgtgctattttgctttttagggagtagcatcatattgaggtcagaggggactatttagtgcagaaatcccgtctggatgaaaaaccaactaggagcacaagatgagtgagtccggggtgttctctcaaattcacctggagatggtattggactgtgagtcagcagcatggtgctgccatgaagaaaagacagctagaaaggaaagcgcaagtcggggtggagccaccaatccgcttgagctaactgcacactggcagaggccttttctgggctgttcaatgtgggggaagatagataactgtgcaccagctttaagcattgtccttgttctatggagcttatagtctatgctaattaagtagaaataagaattaaggactgggtgcggaggctcatgcttgtaatcctagcactttggaaagctgacgtgcgtagattgcttgagcttaggagttggagaccagcctaggaaaccccatctctaaaaaaaatacaaaaatttagctgggcatggtggcgcctgcctgtaatcccagctactcaggaggctgaggtgggaggatcgcttgaacctgggaagattgcttgaccccgggaggtcaaggctgcagtgagctgtgcttgtgccactgtgctccagcctgagtcatagagcaagagcctgtctcgtcagaaaaaagagaaagaaataacaattatgaaggtaggataaaaatgtcatgttggaatttttcaacctggccaagggaaggaaagttgatgagtggttcatgatggccttcaggcataggacggactcttacatacttgcttttcacttctgttaagtagaagacccaaagagatggattttgtttgtaggtgagaattagggaagagctctttgatagtgaaggtggttttacctccatgtgcacgatggcagcggcatggctgagaatctcaggaaggctttctacttggttaatgtgggtcttttctctctgcgggccagcactccttccagtgcttggcctgtagacttggtataagaccttcctacttagcagagaaacgttaagatggagaagagaacattctcctagaggtaacttgttggagtagagagacaactggacgtggaattggaggaaactgtcatagttttgtctcttactagcggtatgacccggagctagccattcacttctgggaatcttagtttttgtttatctcttaaatggaaatctcttagtgactcactgattcattcaattcattcttttctattcatttatttatcacatttgtttatttgctctttggtttataatgatatttattcatcctagaaatctttgttgagcacctgctatgccccaggtacactgaaagagacaaaggtgagactaactccggtttttcagatgaagagagagaatgtttgtaaaggagtattacatactgaaaaatgctaccttaatgtaaactatcacctttgtgcccctgaagatatacgtggggggttatcaaattatgggatgtcagagctggaagggactttagtttccttcctgagaagccattattttgctccatgtgatgtttgaacctaaccgggacactaatgtccattcttggccggcagaatagaagtgagaaagtgctacttcgtcattttacccactcagattatctgtgaactctcagcctgcacaatttctgaagctgcttttgtggcagctccttactgtgtatctggtagttgggaacacatactgtgtgttccaatagcttcttcaactgtgactcagataaaggcagaggctctgtcttggcctcttctaaccttaacatctagtaagtattaaagacgtgcatgtgctctctgttccctttctacataccttgtgtttacatagggcattgtttgcagacatttacatgtttacatgcccatcgtgtctaaagactatgtcttttattagtctttgtctgtctggtgtctagacaatacctggctcacatggaaccctcaaaacatgtttgctgatgactcagacaagcaaggattggaatacaccctgctccactttgaattcacctgcccttccttccctccctcccttcctccctctctccctcccttctcctccctcccttcccttccctccctcccacgcttcctccctccctccctccctcccttccttcctcccttcctccctcccttccttccttcctcgctctgtcacccaggctggagtacaatggtgtgatcatggctcactgcagccggaaactcctgggcttaagtgatcttcacacctcagcttcccaactaactgagactacaggctcaaaccaccaagccaggctcatttttatattttctgtagatatagggtctcactctgttgcccaggctggtctcaaactcctggcctcaagccatcctctcacctcagtctcctaaagtgttggggttacaggcgtgagccactgctcctggcctcatttttctttaatgctcatcctaatccccttttccatgaatcatttgaaaaataactaagttattttaatatattcacctatcaggcttgtttttaaccccgtgattatattaattatttcacatctcacaggtaggtacatctcacagtattgtcacgtcactcagcaatctttcatttccatcttgggctacgtggtggagacccatgagagttttcttctcttttgtatggaatgctgtacaaacagaacttcccagaagaagaatgaagaattagatacgttttgggcaccattcaacagatggcaaaacaaatcctccgttccattcccctcagctagccacattctcccccttctggatgtaatttgttaaacactgaactcagccccggtgaggaggttattactgtttctatcatttgtctcctgctccagggacttgccttggcctcagaaaagaggcttgtgtattccaggcagtggggactgcaggggtcccatgctttctgcccccacatgcttggggacagacatagaggtgccctgcctcacctttgtgtgttatctggtaacatctgtcatttcctatcaggcacctaatgggagccacgttcaggatccaggatgggatgtttgaaagagatctttctgcttgggctcggtggctcatgcctgtaatcccagcactttgggaggccaaggcaggcggatcacaaggtcaagagattgagaccatcctggccaacatggtgaaaccctgtctctgctaaaaatacaaaaaaaaattagctgggcgtggtggcaggtgcctgtaatcccagctacttgggaggctgaggcaagagaatcgcttgaacccgggaggcagaggttgcagtgagctgagatcgcaccatggcactgcagcccgggcaaaaagagtgaaactcagtctcaaaaaaaaaaaaaaaaaaaagaaagatctttctgccagtttctcaccaactctttctttttcatctccttttctctgtattccaggtgtacgtgtcttacgactatggaaaatcattcaagaaaatttcagacaagttaaactttggcttgggaaataggagtgaagctgttatcgcccagttctaccacagccctgcggacaacaagcgggtaaggaagtggccatccctcctgtcccgacttcatgggactgggttttggaaagattgccgcacttaagggggtgctaggagatggcgctctctgtgatctttgtagcatgactggtggctagtgagtttttgtgctaacctgggcatttgtgacagactgctgttctcagggttggtctctgcacaatcaggcaggccaaggactggtcaggcaggatttctagacaaacaatgacaggttaaaccacagaaaatcagccaactcttgtaataccttgcccgacttgcagatggcaaaaatgtttcccaggtacactgagaataaccttgcaatcaaattcatgttttctaggatactatcagtgtgtctgcttgcgtgcttatgcgtgcttgtatgcgtgtgtgtgcatgtacgtgcttgtgtgcgtgtgagtacctgtgtgcgtgtgggtacctgtgtgtgtgtgcttgtgtgcatgtgggtaactgtgtgtgtgcttgtgtgcgtgtgagtacttgtgtggatgtgcatgcttgtgtgcgcgtgagtacctttgtgtgtgtgcttgtgtgcgtgtagttacttgtgtgcgtatgggtacctgcgtgtgtgtgcttatgcacatatgggtacctgtgtgtgtgcttgtgtgtgtgtgcagatacctgtgtgcatgcattggtacccacgtgcgtgtgtgggtacctgcgtgcgtgcgcatgcttgtgtgcacgtgggtacccacgtgcgtgcgcatgcttgtgtgcacgtgggtacctgcgtgcgtgtgttggtgcaaccctctgtcccccggcctctgaacctgtaccgatatggaaaagaaaaccaaggcagcagatattgctatgcctcctgctttgttttcccagctggctggccctgggggctttgtttcttcagttaggcaatttgatttgaggaagcgttgaccctgggcccccagggaggtggaggcgggagggcaggaaccgggcagccggcaaggctttcctgccagttgggtagctcttagctcggagagttgtatttcgttgctttcttccccactcttgtgttaccgtgtttgtttccaggccagatcttctacggaaagacccttagtagaaaaactaagagaaacattctagtagcaaaagctttctgctccagaaaggaacaagcaagcaagatctacagggtcctctttccagtccctagtcctggcttctcaggttgcttgaggtctcctagcaggggctgcattcaaaatatttagcgactggtgtggcttgggcactgaccaatcagaacaaatcctgtctggaggaggctgggtcctggacgtcccctgctgggccatgcattaacttttgagttgctgaatttcagggagatcctggggaagggaccacgccatgggaagtgttgtggggtaggcttaggaagggccacttaagggtttcagggcagcggctgttgaccaggtggtacagagcagttgttttttaacaactggaatggtcattactggtacatacttgttaaaatatcagctctgcctgatgatctcagagtggagtggcagttaggagcaaacttccctttcttacctaactccagggtgacagagtaatttttccccctgagatgaaaagcaaggagaaggtgttggagggaattggccccatagacgggtcagccagcctttgtgcccctttgccccaccgcacagtgtggtccccaggactcccagagaggggtgggccccgctgcttgccttgcctttggctcctccgtgaggtgaggagccctgaccagggtccagctcatagctgcctcttctgtggatggatccatatgcgccccgcctctcaagaatcaaattacacctgctgatgtgttgtatgcttggaaatgcagagtggattttgtgttctcacacaaaaataactatgagagggaaagcatttgttaattagccagatttaaccattaaacaatgtatgtatgtttttaaacattatgttctacatgataaatacatataatagtatgtctatttaaataattaaatttgaaaaaaactaatcaaatattatcataagtaatgataaaaaccacaatttcttttgcagcaaactaataacacctggatttctcaatttattaagttgtacttacctgatgctgatgatgattactgtatttacacattgtctcagagctcactcttgcggaggttgtggcctcgaaaatgccttgttgtccctctggaatctgtcttttcagcttcatctcctcctcctcacctcctgctgtggtgcacagatacctataggcaggctccatctcctcctccccagctcctcccctagtgcacagatacctataggcaggcttcatctcctcctccccagcttctcccctagtgcacagatacctataggcaggctccatctcctcctccccagctcctcccctagtgcacagatacctataggcaagctccatctcctcctccccagctcctcccctagtgcacagatacctataggcaagctccatctcctcctccccagctcctcccctagtgcacagatacctataggcaggctccatctcttcttccccagcttcttccgtagtgcacagatacctataggcaggcttcatctcctcctccccagctcctcccctagtgcacagatacctataggcaagctccatctcctcctccccagctcctcccctagtacacagatacctataggcaggcttcatctcctcctccccagctcctcccctagtgcacagatacctataggcaggcttcatctcctcctccccagctcctcccctagtacacagatacctgtaggcagactccatctcttcttccccagcttcttccgtagtgcacagatacctataggcaggctccatctcctcctccccagctcctctcctagtgcacagatacctataggcaagctccatctcctcctccccagctcctcccctagtgcacagatacctataggcaggctccatctcctcctccccagctcctcccctagtgcacagatacctataagcaagctccatctcctcctccccagcttcttccatagtgcacagatacctataggcaggctccatctcctcctccccagctcctctcctagtgcacagatacctataggcaggcttcatctcctcctccccagctcctcccctagtgcacagatacctataggcaggcttcatctcctcctccccagctccttccctagtgcacagatacctataggcaggcttcatctcctcctccccagctcctcccctagtgcacagatacctataggcaggcttcatctccccagctcctcccctagtgcacagatacctataggcaggttccatctcctcctccccagctcctcccctagtgcacagatacctataggcaggcttcatctcctcctccccagctcctcccctagtgcacagatgtctataggcaggctccatctcctcctccccagctcctcccctagtgcacagatacctataggcaggcttcatctcctcctccccagctcctcccctagtacacagatacctataggcaggcttcatctcctcctccccagctcctcccctagtgcacagatacctataggcaggcttcatctcctcctcccgagctcctcccctagtgcacagatacctataggcaggctccatctcttcttccccagcttcttccatagtacacagatgcctataggtgggttctgacttcctttctgcttgttgtgggttgtggtgaacaactgctaaggccacaagtctgaagagtcagaagacaggacagatgatgttttggacttgaaggaggagggttagtgcaggcagaggactggggctttggaagcactggatctggagaaggagcagagcaggggccgtggtgtttggggcaagagcaaggggaaactggagggtgattccagtaagggagtttaggtgctgcactgtggaatgggggtgacatgtttgcatcccaagtgctgtgtacctccgagtggtgtgtcttagattctcatgggtggatattctttggagttggtggggttggagaagtcaggagaaaaaaggctgccttcttggagaatttgttgacagttgggcctcaggcctggaacaggctgagtgggttggtgggggcagcattctctgtagatagtttctaattccccagagaaggctgctcctcaccaccccaccagactctcaggaaggaaatgatgactcttaacagtgctgattgcttctgttacttttgcctttgtcccctggaaggcaaattgccccaccagacctaccacttcctgagaaaaatcacacaaggctggatgccttgctgtcaacagcagggcgctctgcctaggcaaatcacccaggtgaaaatgcgagctgccaaggagcatttgaaatggtcgaaatgaatgttagcagctgcttggaaaggttaagatgtcaggaaagggcagcgtggatgtctaggagcatgagtgcctgtggaaggggagagaaggtgctagcgcggcatccagttccagtccgaaggctttgccttgtgatggagatggtgcttgtgggcccatgtgagttttgggtctatttctgcattagccagcagtcccacttccttcttggtctcctgtgtgctgccctgaaccattgtgcagtgctggccacatggcagttctgccaacattgtggggcccctgagattggtcagacagaattgaaatatgtttggcgctgttatttgcttacttaataatttttaaaaaatagagacaggggtcttgctctgccatacatcctgggcacaatcatagctcactgtaacctcaaattcctgggctcaggtattccttctgtctcagccttccaagtagctgtgactacgggccagcgccactgcatatctggggctttttaaaaaaggacactgaatgtacagttaggcctcacagcctcagcctcagcagaagcaagacccagtcctgcctttttccaggcagaggttggtcctaggtaaaatttcattcccaccttctagagggatgttccttcattgccttctctgcccttcctcctctcattgtactcttggtttctccacttgaaactggagaaagtcacttatgctaatagactgtggatacattctatagcttagtttgttttctttccagaggtatttgtattttcagaggaaacagcttttaaccaaaggaggaagctcctctggaatattaagttactgcaaacagggttggagagattggggtacacaaaggcactcctgaaattgcatagtttgggaagcaccttgtaggtcagctcttggtcagtctgtaggtttggcctccagtaaacttgacagccaggcagcacagagacttaaaagccagggtgaaatactgtgtcttcctaacatgtacatatctgaccctttgtatcacagcatgaggtaccatgtgctcaagtgatgaatgtaacctacaaataatagagctaggggaatcaaatgaggttggatcatagaagccaagtcttcatggggtacttaggatttgatatgagcttcaaggatggacatgtgaccccagtaagtagaggagagctgtcaggagccctcaagcaggagaagggcgtcagcagagactgcaaagtgccaaaatgtggtttctgtgcaggacagcgaggagattcactttttggtggtggagagcttgtattgagctgctgtgcaatgtcaaacaggcccgtgtctgaagatggagattgtcttctgctttgagggctgaacagagctaggaaagaatatttgagtaggggtgtaaatgaatagtgtcctttagggaaatgtgtcttctggcaatattcttgactttcccttttagcagggaaagattagggaagagtctagaaagggaactattgtggcagtgtaggcatgaagttgctcaatcaaacctggtatcaccctctaagtatttcatttaggccctggaagacatgaggatgaagaagacccattgcctgcctccagtttgtttagtctctagtgaagacgtgggccatgccaatagcactgagaggaaaaaggaaggcacatattttgagaaagattttaaaggaaaacaaaacaggtttggtggctgatagagagtgagggccaaagggaaggactggagtaaaaacccatctctgcttgtgagtagtggggctgggagaaggcatagcaggcaggagacttgggacgtggggagggagaattgggttttgttgggaaagttttgaagaactcaagttttgcgtatagtaaaatatcttggcccatcaaaagtggagatggtgagaaggtaaacaaaaatggaatctctgtaagaattgagggttagactgtagatttgaaagtcatgccatgcttcttcttttgtttttgagacagggtctcacttcatcacccaggctggagtgcagtggtgtgatgtcggctcattgcaacctctgtctcccaggttcaagcgattcttgcacctcagcctcctgagtagctggaattataggtgcacaccaccatgcccagctaattttttgtatttttagtagagatggggttttgccatgttggccaggctggtctcgaacccctgacctgaagtgatctgcccaccttggcctcccaaagtggtgggattacaggcatgagccaccccgcccggccccatgcttgttcttaagggcggtggttgaagctttgtgaaaggataagccaaagttagcagcaaaggatggaagaagaatgaggttatatgagcgtagggagtggggaggaccaaggagccagcagaggagaatcaaggcttgagatgatcaggggctggggatggagaggtgaaatgagagggtgctgtggattaggagagaaggcacacaaatgagttaaatggtacaaggtaagacctatgaatgaagttcaggaaatgttgccgttttgttaaaagagctgttaaggggtgagatgtgaacatgtgaaccagtcagatattgacgtcaatgctgcctagtcctgcgtcaccttgggcagtaaactactctcagtctcagtgtcctcattattaaaagagtgtataacggtaatatccaaagcattgagtcactgtgaaccctgaatgagatagggcatgccaaacttttagctcagtgcctggcatataggaagtgctcttgaaaacgtttagctattaccatggacaataatacattctatgacggggtgcgtgatttttggattctccaatgtgagactgcaggaagccatggaacagatttctggggaaatcttttcaaattgaggatgcttccttccccaataacctaggtggtttgggagcaggaagatggactatgttatttctggggaatacttttatgccagaaattatgatgatcctcttaggatcataattgttttttataacattgcattttattgtagtttttgctttcaaaacatttactaccttttccagtttgatttaatgaggcttctgcagagtttagagatttacctgagatgctggggaggaaacgtgagagagcgaatccacaaaatatgtccctgggaagtttatggtctggatttggggagagagtgcaaatgaaaaggagtgagcacatctgaaagcagcatgagacaagtgcaaagtgctggtccacaccgaggctgtggcactgaaaggtttcagagctggagattgatctgggtcaggtggagtccattcgagaaagtgtccttgggcttatcctgcaggattgcttgacttctaggatgtcaatgactggctgtgggtagaactaggtccctgttgctctggtttctgattcataatctcctgagccttcctcattcttccaggagcagggaccggcctccgggtcttgccaggtgtgcatgcgaggccttacatcatctgtgcttcccagccttgttttctggttatttctctcaggccctcaagactgtcactgggtgcagtggctcatgcctgtaatcccaccactttaggaggccgaggcagcctgatggcttgagctcaggagtttgagaccagcctgggcaacatggtgagactctgtttctttctttctttttttttttttttttgagacggagtctcactctgtcgcccaggctggagtgtagtggcacgctcttggctcactgcaagctccgcctcctgggttcacgccattctcctgcctcagcctcccgagtagctgggattacaggcccccaccaccatgcccggctaatttttcgtatttttagtagagatgggttttcaccctgttagccaggatggtctcgatctcctgacctcgtgatccccccgcctcagcctcccaaagtgctgggattacagccgcgagccactgcgcccggcggtgagactctgtttctacaaaaaatacaaaaacttagctggttgtgatggcacacacctgtagtcccaactacctgggaggctgaggtgggatgacctcctgagcccggggaggtcaaggctgcactgagccatgattgtgccactgcactccagcctgggcaacagagcgagaccttgtctcaaataaacaagactctcatcaaacccatgctatatctcttttccccctttgtgcccaaacccacactgccctagacgtggaatattctttccctgtgggagtctcacctgccctgcgaggcccacctcttccatggaatcatttctcatctctcagcctggagaggcactcataggactctggtcatggcttctcattcagcctcactttctcttgactgatggttagccctggacatgtctgtctcccatgttagattttgagctacttgagggaaggcatcttgggtttttgtggcagctcctgagcgtctggtccgtggtgggaatgcagcacacatgtgttaggttgaattgcctggatccttctccccagggaattctttcagccgcagccactatccagcctaaattgttcagattcactcatccacacagaagctaagtaggatgaggcccgtgctcaccagagctacttactgctctgccccagagtgagcctgccagccacagtggcagcctggtccccagagctgccgatcacctggcatagcagcacgaaggagaagcttatcttcttagatggaagtgattttagtgcttttcctggaaagccatgtcccatagctgcttggaggatgcagggagactcaaccatcccatctgtgttagccaatctgaaaagtagggcgtctgtgtcccagatgccagtaactaccctctggttgtgactgagtgacccactagggagtgggaattgctaatttcattgaaaggaaacaacagaaaggcccacttcattacctggttaaacaagcccaccttgtagcttcatcccggtccatctccaggcctcctttcgctgagccttgtttggagtatgccagtgtctttttattgccaagagatggggagaaagccattgtggaagccctgtaaggctgtggtgccttgttggtgccagctggcccctgcacatgtgtgtactcgtgtggactcgcacatggtttaggggagtgttgggcagctctggacagggcctgctctcaacttacctgttttcccttgcagtacatctttgcagacgcttatgcccagtacctctggatcacgtttgacttctgcaacactcttcaaggcttttccatcccatttcgggcagctgatctcctcctacacagtaaggcctccaaccttctcttgggctttgacaggtcccaccccaacaagcaggtaagagggctttcagaacccagttgcatggggctcctctagttttctcctctgcctgtgtggattgtgtgtcctttgagtgacctcgcctcctgcctctccctccttctctcttgggcctagcctttgtagctactatttcacttaccagggctcaagaaaaatatctcctcctggcactctcagttggcagcccagccagccatcagcacccagcacttggcaggccctgtgagttaaacatcatgcccttctccatgcagttgcacctttgttagcccttggggtaaatcgaggctctggaatttaatcagagagagagccaggtggagaaagctggaatctgagctcttcagggaccttttgttgaatttctgttctgctttctccatcctccatcttaaacactgcttttgcctcccatttatttgaagttaccactaacagtaatagtcttccttcgagtgcgtgcgtgtgtatcatataaatgtgtgtattttcctccttcaacccaggtttgaaggaaatctgagagatgaggaaagagcctgagtaagacttatatctcaaggttgaagcttgccaagtcaaggatattagtttggcaaaaatctgtgaaacttgtagatcctgtatgattggatttacagtgagccttgaatgtttttgctcagagaaaccttggaacgtttttttgcaggttgtttaaccaaaacacagatctgtttacctttgcttgccttagggagtaacctaagtatgggctgggtcagtttaccagcggagggggaattattgttactttgggtctcctgcttcttaatacatggttgctagggccggaggaaccctcagattccatctgtggaagttgaggggctttggcaaagatcagcaggttaattcctcattgccacagccgtgtattcagttggttctctgtggggctctgtacttagctggtgtcctctgcattcatctttaattatcagggcccattactgttgttttcttcctcttttttgtgcgtgttaaaatactcataacgtacaatttgctgttttgacccttttaagcatgcagtgtagtgatattgagtatattcatattgttttgcagccatcaccaccatccatctctagaacacttttcatcttgcaagactgaaacgctacacccatgaaataatacctctctgcccccagcccctggcaaccaccattctactttctgtctctatgcttttgcctactctaggtacctcctaagtggaattaatactatttgtcactttgtgatggacttatttcacttagcagaatgtccttaagattaatccatattgtagcatgtgtcaatttttttctttttaaggctgaataatattccattgtatgcatagaccacattttgcttatttgcttatccctcatggacacttggattgcttccacattttagctgttgtgaataatgctgctatctgtgaaaggtttttaaggacactgtttcttcgttgaaaagtgctgagtataatcatcctttggtttttaccattacctagaggctagtcttgagtgaaatataatttttggtaatccataaatggaaggcaagtcctactcatttttccttccagttgctattgagagaacacataggtacacagttgtctttcctttcttgcccttgtttgcttttggagcaactgagctggctttggcagtctcagtgcctgccttcacagacagcgtgtcatggaaggtgggatttcagcgggtgtttgatggtgatgccattcaggttgtattatacatgcctcttgcatcatgaccacttgtctttgcagctgtggaagtcagatgactttggccagacctggatcatgattcaggaacatgtcaagtccttttcttggtaagttgtgtcatctaagaaatcttgatatatgtaacctcctttctccagttctagctccttcttggtggacaaactgccctcccctgaaatgtccagcatttattcaggaaatacatttttccagatctgagaattagagctgcaagtacaatgatctcactgtgggagagagttggggggaggagaaagtaaggtatttatgagaggagtggtagagcttttgcatttttcaatcaatcagggaacccaggggaatcttgaggcccttgcatgtttgtagagtttcatttttagagcatcatattagaagtgggagtttttctctatataaaattcatgcatttcgctgggtgcagtggctcacgcctgtaatcccagcactttgggaggctgaggtgggcagatcacctgagctcgggagttcaagaccagcctggccaacatggtcaaaccctgtctctactaaaaatacaaaaattagctgagcatggtggtatgtgcctataaatcccagctacttgggaggctgaggcaagaaaactgcttcaacctgggaggcagaggttgcagtgagccgagatcgcatcactgcactgcagcctgggcgatacagtgagactctgtctcaaaaaaaaaaaaaaaaaaaattcctgcatttgttcataacattttcttgaatgtctgttaaatataaaacctactagattcttaagggtataagaaattgaataatttatggatatagttattaaggagaggtaaggaaagacatttcaggtacgtaacacacattgtgaaagaggcacagaggtaacagacatagtatgagaagctagagagaggatttatccttccagatgggaggatcataaacagctgtgtagaggaggtggcccttgatccaggatgtgcacaacaggtaggatgtccctgtgtggaggtgtggaggacaggaattccaggcagaggaacaaagtgacttgccaaaggcacagggatgcgccaatgtggtgcttgggtagagaacatgaactcttaattttggacagtgtattgggtgaagttttgaaagggaagttggtattagaatctgcatcgcttgataaaggaatttgggctacattctgaaagcaatgaggtacccctgtagttttgtgagaagaggagtgaaataaacaggctgtacttcaagaagtacttctagaagtaaatagtaatatacttatcgtaatttactattacagtgataaagtagtataggatcttgaattatatgaatttgtacatgtgcaggcaaatgtgtaggacagatttctaggagtgggtatgctgggtcagtgggtttatctaacagctatccattcactcacatggatgactgatagatattgcaaacttgacccctcgcaaattgactcttgatcttcaccaccccaaatcagctccacctataacttttctcatttgctcaggccaaaatctttggagtcatcgttgatttcacatttgttttatgctttacattcattctatcaggaaatcctattggcttcaccttcagtatatatctagaatcttctactcaggtaccacttctagtgccagcctccagtgtcattgctcattagtctcccaactagtctttctgcgtttactcttgtttttctatcattaattctcagcatgtggtcagtttgagtctattcaaataaattagatcattttgttcctctgctttgaaccctttaatgcttcatcatttctctcagattaaatgtcagataccttcttaccacagggaacaggatatttgcaattgctgttttctctgcctaaaatgctgttaccaaagatatacttactgcttactcccttacctcattccagtctttgctcaaataacatcttctaaatgaagcccacctcatttatgcccaccttaggatcctatttaaaattgcacctggccaagtgcggtggctcatgcctgtaatcccagcaccttgggaggccgaggtgggtggaccatctgaggtcaggagttcgagaccagcctggccaacatgatgaaaccccatctccactaaaaacacaaaaagtagctgggcatggtggcgggtgcctgtagtcccagctactcgggaggctgaggcaggagaatcgcttgaacccggtaggtggaggttgcagtgagctgagattgcgtcactgcactccagcctgtgcgacagaccaagacactgtctcaataaataaataaataaataataactgtctcaatgaatgaatgaatgaatgaataaaaataaaattgcacctactcccccattactcccaatctcctgtactgtgttctgttctgttttgcagagcactttaccacattctaatatactattattatgcttattatttgtctttctcccttcaatagaatgaaagcttcccaagggcaaggacttttgtaagttttgtgcactgatatatccacagtgaataaatccttaaaattgtaactttggtagagagtgccagatttgatatagaaagtgtcaagtttgcactcatctcaacaatatagaatagtgtctccctccacagccaatgtgttagggaagaaatattatctctgtggtttaatttgcattttccttattatgagttagaacatcttttaatctgcttaagggtcatttttttttttttttgagacggagtcttgctctgttgcccaggctggagtgcagtggcgtgatcttggctcactgcaacctccgtctccagggttcaagcaattctctgcctcagcctcctgagtagctgggattacaggtgcctgccaccacgcctggctaattttatttatttttattttatattttttagtgagagtctcactctgttacccaggctggagtgcagtgacactatcatagcttacagcagcttcaaactcttgggctcaagtgatcctcccacctcaccctctcaagtagctaggactacaggcatgtgcagccatccctagctaatttttacatttttttgtagaaaggaggtctccctatgtttcccaggctgatctcaaacacctggcctcaagcaatcctcccaccttggccttccaaagtgctgggattatggtttgttttatttatttgtttgtttgtctgtttaagtatgaccaggctggagtgtagtagcgtgatcttggctcacagcaacctctgcctcccggattcaagtgattctcctgtctcagtctcccgagaagctgggattacaggcacccaccaccatgcctggctaatttttgtatttttagtagatatgaagtttcaccatgttggccaggctggtcttgaactcccaaccttaggtgatccacccaccttggcctcccaaagtgctgagattacaggtgtgagccaccgtgcctgatctcatgcctgttttctatttgattattagtcttttcattgttggtttcaaggagctctttatatattcgagattagccctttggctgtgatatgagatagatcgtatgtgtgtgtatttatatttctatctcctagtttttcatttgtttttagacttttacttgtaattttagtcctcattaagtgtaatggtcccagaagatgtagatactgcctttgtttcttttagttctccatgtaaagtgaaatgtcttttagttggtattgcttccttagtaatagaggtaaagatggagctggtatgttgaggagccttacagctgaccatcatcagacacccatagattctgtttatgtttccacagagggtagctgtttctgacccttttgttattttccttgagcaaaagttgtgggatcttagtgaaattataaccacagtctcatccaaggacaccctctgctcaaggagaaccattagaactttcttctgctttatttgaattttaaggggaaaaattgttcttttatctgcttaagaaactataaattaagagggcaaaccagcagaattactagataagggaacatacaatttagaaattttaagttctaaaatcatattgtaccttctgcctctgtgtagatatacagatatcctgggagaaaggactggtttatctcattgaagctaatgacatgtcggttaggggattttaggctatttgtgggatttctccccctaggtttccccataataagtgaaagcgtaatctagtctctcagaataatgatatacatttgttcaacaatgcttggcgagttgggagcagcaggagtgggaaagctaaaaatttacatggtccggagcttgagattggcaagacagaacagtggaagacctggagggggctgaggggactcaaagataccctgtggagcatcattgagggatttcaggtgaggccaggtgaggctggtgactgctcagagatagagcaaggattggaatttctcaatgaggacaaagacaatagaaagtaggtgtcagtgagcgtaagacattggaagtctaagtgattgcaaagtatgagaacttgtaggtggagcagcttgcagaaatgggaggtccaaatatggattacggaagaaaattgggatgaaagtcacagttctttctatctctaggtgttggctgctgcttttggctaggaaggaataatagaggtgagctgggtctcaaaatagctcaataaaggttccttcctctctgccgttttaaaaataccaagcagcctcattttaatttgcatatcctctggctagaggaagtactttaatcagtacttctaattgtggaaaagaagagaacatgccaccacccgcccacacatgcacacagaggatctgataatgaagaatagtgttctcccacactaggaccaaagctgctggtttctccgttgccctaagaatccagattgtagggcaaaactcaagtcttgctcccattgtaaaaagaagctcttttttctttgttttttcaagacagggtattgctctgttgcccaggctggagtgcagtggcacaatcatggctcacccagcctcaaacttccaggcttcaatccacccacctcagcctcctgagtagctggggctacaggtgtacgccagcatacctggctaatttttttaaatttattttttgtagaggtggagtctcactatgttgcccaggctggtcttgaactcttgggttcaaatggtccccctccctaccctggcctcagcctcccaaagtgttgggattacaggtgtgacccactacatctggcaaaagaggttcttgtttttctgtttcttattttcctttttgggaggggtggggggaatatgctcttgacagtatatctctgaaggaatttgacacgattaccttcattattctgagagccatcatgcatatgggattgtataagggcagttacctaactgaggccttctgcttttccttgagtcatcactctgtattctcactacaagactatcttcccgactttaccatttattttttccatttgctgaatggttcccatggccttggtgttcttgagaatgttaggagacctggagcagataagttgtcctctgagctgctgtgtggggattcttgggggatcactggctcagaagttcttctccaaggtagtttggcctggtcattctatgttttcattttggattagcttcttgaattgccccacagatccaatgcagaaagtatctcttcagctaggaatactatagggtaaaatgaaatctaagacatggccttccgaggcatctatactgtgtctaggaagctcagacaaatacataatggtgaacaataaaatacagtgtctaagaggcattactgcataaaggaataagactgattctaaaaaatcacccaactaaaggggttttatacctttgtttggagttcaaactcatgtaaaaggcttggaattggatgctgcagagggatgttattgctagtgttgggagaagagaggacagcactgaggaaggcttcctggaagatgaagacttgaacttgatgacagaggagagtaggaattggatggagggatcagagtgcgtgcagagggcatctcctcacgagagtgtggtgtttgcaaaagcacagtgggagaaaggtgccctccctttctgaaggacatcaaggagatcagtatgtttgagaaagagtttgtggaagagcctcatgggagacgaaatgcacaggcagctccagattgcctagatccatgacattggtaggggacagggcagagacagggcagcgtcacttggaaggatcaggctcagaggttcatggtgtggtttctccagtaatgttcttcagaggatgtagcaccttgggaaaactctccttcattcctctgagattcataactttagaccagaaacttgcttatagcttcaagcagtcccttgcttattaattttgaaacattttatcttgtactactactttttgctcttcctaagcagggcagggttgccttgagctaaacccaggatgctttgaaaacaacataaaacaccttgcaaatggcaatttgtcccctctatcctgagtcaaggagtaaccaaagggatatgtttgaggcacagagagtatgatctgtgggtcacaccatggtaggcctaaactctagttgattatcccattgcaaaacttccatgcctctagtaattaaatgtgcaaatgataacaacctttttttttttttctgccaggggaattgatccctatgacaaaccaaataccatctacattgaacgacatgaaccctctggctactccactgtcttccgaagtacagatttcttccagtcccgggaaaaccaggaagtgatccttgaggaagtgagagattttcagcttcgggacaagtacatgtttgctacaaaggtggtggtaagttgaatgtactaaagaataaactacttttgagtttcctttgtgaagtttggcattctgtgattaaacaggtgagtttgcatacacaggaattggaaggatgtgcttgggacagattgactgaagggatctcaacattgacaacattgacgaacattccgaaagggcttggcaggtgctaggaagtcagaggagtggagaggcctaggacaaacactcaaagtggctctaggctctaggaatttggttgtttcctggtagccaagcatccttgacaaagacgtatttctttgaaatcccaatgaaaagaacaaagaatggagaggggagggtggctcagtggcttctttcctttaatcccactgcctgatttcctttaaacttatgctgatttctttgagatttttcaacacatgtcaatttacatggctaataggatgtgtagtcattggctagtgggagttaatgctctaagaaaagcagtaattaagcttccagctgtcagtaagtagcttaactctcagcctttgggaaaatcttccccttgatttgatgtgttggagccagatgccgaaatggtgggcttgctcattcaaaaccagagttgattacttaacaggacttgtcttgaaattgtattgagttcagtctttatcaccctggttgtaaaggaaaaaaccaggcccagtcaagggcaggtggggctcttatttctgggaggctactagcttgctttcctgatggtgcccttcccttgttgactcagggtctgttgaaggcctttgctaactgggaggttactctgttgtctttcactgttaaccttagagactgaaatcagacgtaatcttttccttcagattctcatttacttctataattggtagcaggccaggtggaagtaggtcaaccttcttagtaggattttagggtcaagagaggatctccccagcaggaaaagcagggagtaaggacagaatgagaagagagatgtgggtggctaaaggctagaggcatttccagttacataccttgcaaaatgttctgaaaaaccattagcctatggcagtttttcttgtcaggccatttgcattgacccatagacattggttcagtgccttcctgccttgactgtttctttatctttctcttaaacacacatgcacaaatatgtacagcagcccagaaacataagcatcctcgaatggctttgggcagggatggggtgatgggaacacacagataagaaatcaggcccaagcactggtgccttgtgacatcagttggacagtcttgagttttcagtatggtctaaaaccttgtcttcagttctccagggtttataggccttttctgccttaatgccttgggcctggagttattgtgtgattttaattctgaactctaaaacacattgactgactgcctggtttgtcctcctttttgcttgaaccagggcaggatggatagctgttgtgcatttctcttaaccgggttatttctaggtgtcacggtcgagagtttaagttatatcccagctgggccgggcatggtggctcatgcctgtaatcccagcactttgggagtctgaggtgggtggatcacttgaggtcagtagtttgagacgagcctggtcaacatggtgaaaccccgtctctactaaaaatacaaaaattagtctggtgtggtggcacatgcttgtaatcccagctactcggaaggccgaggcaggagaattgcttgaatttgggaggtggaggttgcagtgagccaaaatcatgccattgcactccaatctgagcaacagagcaagactctgtctcaaaaaaaaaaaaaagttatattctagctggagctttctgtgccctccattctagtctaacagctatgtctgttctccagatgtatctgatttacagagtgcctgtggtgagtttttaattaaacctggccagtggtaagattaggggtcatgtttgttttgatctcaccgatacagtacccagtgccttgcgctatgtttgatacgcagcagatgcgcaatagagttgaatgaatgccatgtttgcccacctaatttaaaaagtagtcaatttttagaaatttggtgggagacgtattaaatttttggtacttttataggcaattcttaactctctgtatggcttatttatttatatgctgttggtggcaaaattgtagttatgagctggctcctccttctgcacatggatgagccaccagattccagggtcagtggtattagtgagaggatgtaggtaagatgagttaggccaccactgagaggtgtttcccaaattgtggtcttaggagtacccacgtcagcatcaggcaaggacagttgttacaagtgcagattgcagggctcaaatgcacttttccccagatcatcccaaggttgtctaacaatcaccagtttgagaaactctgccctgagccttctacaggcagatgcttcaaatgacagagttgtactactgtctagggaatatttctcaagggatggattgatgggaaaagaaacacaactggctgtggatagcacacaaaatatgtgctttcctcctttttattacatcagactgctaaacgacaaggataaacaaagttggcctcggtcagataatcccctcccagtaagagtgttgaaacctgcaagtgtaactttttatctggggtctgcctagctctaaggctgcctgagcttgggaaattccagctggctttagtgttaaatgaattcaaatcaaattgggaaaatcaaagaactgattttaaagctacagaaagctggttttgcatgattaactcttttgcttccttccagcaccatgaatgattacagtcctttgcaagctactgtttcagccccctggcttctggactggagctggtgtccaggtcttcagaacctcctggtaccctgttggcctcgctctggctttataatgtgctttgtattttttgcccttaagttgccttgtttaatttttattccttgctttttgacatgaagttcacttatttgtcttcatagtgtacatcaaaatgatagggccattaaagaaacaatgaggttcctctgtgatttgttaatttggtaatatacaactgttaggctctttcagtagataacagtaattgctgaaaagcttgaggtgggtcagggttagctactcccctacaacctcacaacctcataacctcactaccagattaagattatcatgcaagccaggcccagatatttcttgcacaaatgtgtatcagtaagcaaagacatgatctgtggacttgaagtctcttctgtgaccttacagatgatgcagccacccacgccttgcatgctgcagacgctgtgttctagagtggatgctaggaaactatggcccaccacctgtttttgtaaatgaagttttactgggacacagccatgctcattgcttatttgtggtctaaggttgctttcatgcccagtggtagagttgcataggtacctatacagaggcaatatggctccaaaagcctaaaatatctattatctggacctttacagatagttgtctgacttcctgtagttgctgactatgctgatagttgtctgttaccccttcagttggcatcaggtaactggaatcgcaatgtcttgacaggtcccaggcattatccagaaaagtataggttatgggcctctctaaattgttatgccctgttaatgacaggatggtatctttagaatattatgcccaattcaagtattttgatgtcacaccagtctcccaagtgagggtccatgtgtattttcatgattctgactaagcaaccacgaatttcactattgaaaaccaattttcaaccttaagctaatttgctctctaatgttgatcagaggtaacagaacagtttagtaactgctacagggtgttgtgggcttctagatgagaaatcagctgacaaaactgtgttgtgaattataggataactgacccaaaccaaactacttataaattattttaactatgttacttaaatgtataagcacccaatgcttataactctcatacgtgatcaataaaacccagatatttacagattaaaaataaaactataacaatacatttaaaattaatatttgttacaactgtgttgagatacaattcacattctgcaaaatttaccctttttaagtgtgcaatttagtggtttttagtttattcataaggttatacaatgatcatcattacctaattccaaatatttttatcacctcagaaagaaaccacatacccattaccattacttccttctcctccctgatgctggtaaccactaacctagtatctttatggctttttcaattttgggcaatttgtgtaatggaaatcatacaatttgtgactttattagtccattttcatactgctatgatgaaatgcccgacactgggttatttataaagaaaaagaggtttaatagactcacagttccacatggctggagaggcctcacaatcaaggcggaaggtgaaggaggagcaaaggcatggcttacgtggcggcaggcaagagagtgtgtgcaggggaactgccctttataaaaccatcagattttgtgagacttattcattatcatgagaacagcacaggaaaacccgcccccatgattcagttacctcccaccaggtccctcccatgacatgtggggattatgggagctacaattcaagatgagatttgggtggggacacagccaaaccatatcagtgaccttttgtgactggtttctttcacagtataatgttttcaagtttcatttatgttgtagcatgtatcattactttaaccatttttaatggctgactagtattgtaatgaatataacacattttatttatccatctattagttggtggccatttggcttgtgtctactgttttactgttacaaacagtgctgctgtgaatgttcgtgtgcacgtttgtgtgtgaacttatgttttaattctgttagtttatacctgggagtgtaactactgggtcatgtgacaattctttttttttttttttttttttttttttttgagatggagtctcactctgtcgctcaggctggagtgcagtggtgtgatctcggctcactgcaagctccgcctcctgggttcatgccattctcctgtctcagcctcccgagtagctgggactacaggtgcccgccgccacacctggctaattttttgtattttttagtagagacagggtttcactgtgttagccaggatggtctcgatctcttaacctcgtgatccacccacctcggactcccaaagtgctgggattacaggcgtgagccaccatgcccggccgacaattctatgtttaacttttcgagaatcggtcaagtggttttccaaaactattgtaccattttatattcccaccagaaatgtattagggtgtagttttcccatatccttgtcaacatttgctactgttttttggatgatagccatcccagttaagtgtgaagtggtatcttatggttttcatttgaattcctgatggctaaggatgttgaacatcttttcacgtggctgttggccatttgtatgtctttcttggatggatgtctattcaagtcctttgtccgtttttaaattgggttcttttttattgttgagttataatagttctttattctatatattctttatatacaagttatatgatttgcaaatcttttctgccattccgtggtttatctttttacttttttctttttcagcactgaagtttttatttttattttatttttttgagttgggggtcttcctctgtcacccaggctggagtacagcggagcgattgtggctcactgcagccgtgatcttcgtgtgctcaagcaatcctcctatctcagcctcccaagtagctgggaccacaggcatgtgccaccatacctgttaatttttttattttttgtagagacggggtttcatcatgttgcccaggctggtctcaaactcctgggctcaagcagtcctcccaccttggcctcccaaagtgttgggattgtaggcacgagccaccatgcccagccgtgtttttaattttgatgaagttcagtttatccatttttttttgctgcctgtgctgttgttatatccaagaaactattgcctaatctgaggtcatgaatatatacttccctttcctttaagagttatgtagttttagttcttacagtctatgattcattttcaattaatttttgtatctagtgtgaaatagttatttaccttcattcttttgcatgtggataaccagttgtcccaccaccatttgttgaaaaggctatactttttccttggcaccttggttggaaattattttctcataaatatgagaatttatttctggactccttctctctttttttttgagacagttttgctgtcacctaggctggaatatagtggcatggtcatggctcactgcagctttgaactcccaggcttaaaggtcctcctgccccagcctcctgagtagctgcaactgcaggcattcaccactgtgcctggctaagtttttgaagagacagggtctcactatgttgcccaggccactgcacctggcctgtttctggactcttaattctattccattaatctgtatatctacccctatgccagcatcacactgtcttgattactgtagttctctaataagttttgaatttggaaaatttgaactctccaactttgttctttttcaagattgtattggctattctgggttccttgcatttccatgtgtattttaagatcagcttgtcaattttttgccaaaacaaaacaaaaaccacagataggattttgatagagattgatctacagattcaacacaatttggagagtgttatcatcttaatatatcatgccttccaatgcatggacaaaggatattcttccatttatttaggttttctttaatttctttcaactgggttttctggttttcagtgtacaagtcccggacttctttagttaaaatttttttcctggctgggcgcggtggctcacgcctgtaatatcagcactttgggaggctgaggtgggcggatcacgaggccaggagttcgagaccagcctggccaatatggcgaaaccccgtctctactaaaaatacaaaaattagctgggcgtggtggagcgcacctgtagtcctagctactcgggagactgaggccgaagaatctcttgaacctgggaggtggagattgcagtgagctgagatcgtgccactgcactccagcctgggcgacagagcgagactctgtctcaaaaaaaaaaatttcctaagtattctttttggctccattgtaaatggttcttttctaaatttcattttcagattgttcattgctaatatatagaacatgattgatttttgtattattgatcttatattctacaaccttgctgaactttattagttctaacttttttggtgtgtggattccttaggattttctgtttacaagatgatgttgtctgctaaaagagacaacatcatcctttaattcttccttttcagtctggaggccttttatttatttatttttttgcccaactgccttgggtagaacctctagtaaaatgttgactaggagtggagagagtaggcatccttgtcttattcctgatcttaggggaaatgcattcagtcttattaagtatgatttttaactgtgaggtttttctagatgtcctttatcaatttgaggaaggttcccttctattcatgggttgttgagtgtttttatcatgaaaaaatctgggattttgtcagtgctttttctgtgtcagttgcaatgatcatatgtttcttttttttcctcctttagtctattaacattgaatattacactgatggatctttctcatatgttaaaccaatgcacatttttggaatgaatcccacatgctcttggtttataatcatttttatcctttaatttgtttggcagaatttaccatctttgtgggaagttttctggatactaattcaatcttttcagtttttaaaatttctctttggttcagtttcagcagtttgtatctttctagtaatttgttcatttattctaggttatttaatttttaattattcatagtgttcacactaatcttttttttatttctgtgaggttgttaatgatgtttcttatttctttcctaattttagtaatttgagtcttctctttttttcttggtaagtctagcttgtagtctagtttattaaatgttgttaatcttttcaaagaatcaatatattgtttgagtaattttctttattatttttctcttctctatttcatttattcctactgtaatctttatatttctttcattctgcttgctttgggcttagtttgcccttatgtttctatgttcttaaggtggatagtcaggttattgatttgatatttttcttctttttttatataagtgattacaggtatacattttcctctaatcactgctttagctgcatttcatatgcttatgttttcattttcattcatcttaaagtattttctaatgattcttgtgattccttttgacttcattgatgatttttgaatgtgttgtttaatttcaatatatttgtgaatttccttcactttttggtttctcattttattctattatgatcacagaatgtactttatatggtttcagttctttttaaatgtattggggcctattttaatacttaacatctgttatccttgagaatgtggctgaacatgtggaatgaaacatgtgctttgagaagaatgtgtattctgctgttattgggtattatgttctataagtgtttattaaatctacttggctgatggtgatgttcagtttatctttttccttttctgccttgttctatattgaaggtgggaaaatcttcaactgttgaaatctttaagtattatcatcttgattatttatttctcccttcaattctgtcagttttccctcatgtgctttggagttctgttgttaggtgcatatatgtttatgattgttaattcttctagattgacacttttatcattattaaatgtccttccttgtctctagtaactattttttgtcttaaattctattttgcctattattatagctattcttttcttctgggtacagtaaacatggtgtattagtccgttttcatgctgctgataaagacatacccaacactgggcaatttacaaaaaaggtttataatggacttacagttccatgtggctgggaagcctcacaatcatggtggaaggcaagcaggagcaagtcatgtcttacatggatggcagcaggcaaagagagctcatgcagggaaactcctcctttttaaaaccatcagatctcatgagacttattcactatcaggagaacagtgataacactatcatggaaaagacctgcccccatggttcagttacctcccacctggtccctcccatgacatgtgggaattcaagatgagatttgggtggggacacagccaaaccatatcacatggcatatcactttttcatccttgtagtttcaatctatttgtatctttgaatccttgtaaatagcatatggttgtgtcaggtcttttatgcattcttttaatttctgccttttgattaggatgtttaatttacttacatttaatgtaattactgaaaggtagactacatatctgctattttgctctttgctttctatattcctgataaattttttttggatcctttattacttcattactgcctttttttgtattaaatacagattttctagggtgacatttaaattcccttgtaccttctttcactaaatttttcccaggtgttttcttaatctgtgctttggggattacaataaatatcttaatttatgaaatctaatttggattaataacaatgtaacttcagtagtgtacaaaatctttgtcattatatagctttattgtgtccctgcttttgtgctattattgtttcatctttatactctttaagcccatcagcacagttttagtctaattgaggactccttagatgagtcatttttctttgctgctttccaaggttctttatctttggctttcagcagttttactgtggtgtgtctgggtatgggtctctgagtttatccttttaggaattcattgagctgactggatttatgttttttatcaaatttggggagttttgggtcattatttcttcaaatattctttctcctttattctctcatctcgtcagtgactttggtaatgtgtatgtcaggacacttgatggtgtttcctgggtcttttaggctgtttatttttaacattcttttttttgttgtcagactgagacatcacaattgacatgtcttaaagttcactgcttttttattttcctggttcaaatcttctgttgaacccctctactaaatttttcttttattatacttttcaactcccaaatttctatttgcttgtttttaaaaaatatttctatttctttattgatattctctatttgatgaggcattgttctcatactgtcctttcatactttatacatgatttcttttagtcctttgaacatatttataatagcttatttaatttttttttttacttagtctaatgtctgagcttttaaggacaatttctactgactactctttttgtttgtgtataggctatactttgttgtttctttgcttgtcctgtgattttttttgttgaaaactggacattttaaatggtgtggtacctccaaaccactgacaccccttcctcagggttttgtgttgttgctgtttgttgttgctgtttttgttgttgttgttattgttgttcagggagtttcctgtactgctatcaagtttgtgttctttattgtttttgctactgaattgtctcgtaatttagcttattggtcagctaatgataagacagagattttcttaaactctttgaaccactaagtctctcagcctttgctaatggcctctgggtgtgtgttagggtataccttcaatgcttttgcaggcagtttacaactctgtcctagccttcacttcctgcttatgtagagcttcaagattagctggaggtaagagactagaccccgttcatttctttcttgagcatactcacggctcttatgtgcttgaccttgtagagtcccaggaatactcatctagagcttattaaagcctcctaagggcatcttcttccccattttttccttttaagctttttagttagcctctttttaattcccaattggtaatactgtcttcagaagttacagtgataagcctttgctaatttttattcactattttcagtaaatgccttggctggctataaggctgtctatatcatgaaccaagtcaggctatgtaaagacaagagctgataatgcagccttcctgtgagcccccagacaggtcaggctttttgggaactccagacctattctgtcctctccagtggctgccaggctgctgtttttcacagctattgtagatgtgaggctgtgggtttccaaggctaccacagagctagagagagggggatgggattagggcaaatgaaaacatcacaaagctggctatttttgccaagattcagccattgttcttgagtaaatgtgccttggatttttgcaaccctttatttcatttgcagaattctgaaaaagttgattttgaggatttttgtcagtgtttttcttgcttttatggataagtatatttttagagttcctagaaatgcttccaattaatattaactttgtaaactttattataggcattttccaacctacacgaaagaacagttaatgctgatatgacctccccacgtgccctcaccaacttcaatattacttacctacatttgccaacctctccttagctatctactcactacttttttttccccctggaatatcccagatgtcagattttagctatgtttcatttatgattttttttttttttttgtaaacaacattaaggtggatgaggatgttttgctgaacctttgttgctgctccaagggaggatgtgacccatggctctggtgcttctgaactagtggccctgtgcttccccatgccttgggagggcttagttctttacccattttctctagctgagctgccatgcaactttcagtgggatagctcattgcagtatcctttggcctttacttgataagaatgtcctttatttagttcctttactcctcttttctccttgatcctccgtttctttttgctcttgacacaatctcaaatataaatggaaattcaggttattcagatacctagatgaatttatttatttaattatttattttttttctgagatggagtcttgctctgttgccaggctggagtgcagcggcatgatctcggctcaccgcaacctccgcctcctgggttcaggtgattctcctgtctcagcctcccgagtagctgggattacaggcatactctaccatgcctagctaatttttctatttttagtagagacggggtttcaccatgtcggccaggatgatcttgatctcttgacctcgtgatctgcccacctcggcctcccaaagtgctgggattacaggtatgagccactgcacccagcagaatttatttttagttatcagaaatgaaaacacaaaattaaaaaaaatcttcttataaattctcagactctataagattgaattagattcaaatatttaaatcatttctactagttgatgaagtttgtgcatttgtggatgtattagttggtacaacctttcaggagggctatttcatgatagctatcaaaaatacaaattttgacttaataattcttctaagactgcatcctaccaatggtattgtgcagttctgaaaaagtaataaatacatgcttatttatatgtgtgtgtgtttaagaatgtttctggaaataactaaagtgcccaccaatagctgttaagtggaaagatgtctaagatacattgccaatgataaaattttaaattgtgggacagtaagatacactgttaatggaaaaagttaagtaatacaacagcatttatatcatgatccaaattatatgtgaaaaattaaattgcctctgtcagtttagaactatattaggttgctggtaatagactagaaataaaaattgcttaaccaagtcaggagtttagttttctcccccttgctgcctggaggtaggctgtcttgggctggtatgttggtgtcctgatgttcttggggatccaggtttctgtcttaatgttctgccatcctgactagtgatttccattctcaagattacctcatggttcaagacatccatactagccttcaagtccttattgcagttaagaagaataaggaaagacagcaagtaggacctcttcccaccaattctgtctgtttaggcagccttctcagaaatccagcacgaaacttctgtttttatctcattgactagtacttagtcacgtgacttcccataggtgcaaaaatggtagagaagtgcagtcatttattctgggtggtgtcagagtcccactgctcaggaggaaagggataatgggtgttgggggtaggtgtagcagtgtctgtcactatgtacatatgcttgcatgtggtggcacagtacatttctgaaaggatgcacaagagctgttagccactgggcactctgcagggtagagtgggaggagggatgtggagatcagagcagagcttctgcatttaccttatacccatctgtgctgttggatattttccatgagtatgctttgctttttaataatagtgataaaaaacaaaccaacccaaaacctatggtttattaagaaaaatctcagagccttacaatacatcttataatcactagtgtgccatagtttaattgttaatatatttcttggtggaagtaaaacaatacagtaactctttaaaaatccattaagaatgaacctgaattgtccaggtttaggaataattctccaagaaggtagtgggatcgatgcattttgagattttttttttgatgattgtagtattctgtgatttttgcatttatgaggtaagactgacctgtgaaatatattcttaatactcaggcctcccagcagcaatcgttaagtatttttaactaatgatgggcctgggtgtcattgagaaatcactctttttaaagttatactcacagttggaagtcgtaaaaaacaaagcataaaaatgtatatttcattgatatgttcctctatatattcacaaaaatgtatgtgtataggctgacttaaactaatcatctgacatagccatgacattttatcaacttaatgaaggcttttggaatttatatgtaacaattttgctgggaactgttttcttattcagttaatatgcttttacatttttaatagatccatcatttcctacggccctatgtttagtacaagctattaatatggttttcaggtttccattttggtgggcagtctttcgtacctctctgcctgatttctttaaaacaaactacttttaaccatttgttcagtggtgatttgaatgtctgctgctcaaatggattaaaagtaactttgtctttatcagctgggtcctcacagtatttatggggcatgtttgagcacagggtactgaatcgttatattgcagataaaataaatggatatgttccttactctataggaagttaatatctataataaacagcaacctagtcaaggataagtgaagccaaagtaacccctctggctgggaatcccaacatctcaatatgtttaatagtcatttgtatgattatgtccacatgagggtatgcctccctgtgtctttcctgatagatatgcaacatttgccttcagcttctggccatgttcttttagagctggaagaaaccacacagagtttttataatagttcttatccttttttgagtggtggactttcttgagaatctgataaaacgtacggagcctccatagcaaaataaatgagtgtatataaaaaaatttgcatatatgtttacagggttgctggaccatttaaacccatctacagggaagtcttgatccaaataagcttctccttttgtatatgaataaactgaaagctagagagatttctatcattttctcagttggtagagctagctcttaatctatgcttttatacacatttccaagattcttgctgtgacttaaaaatctctaaaatgcaatgtgatgtggtcaacatcatgttgaatactctaccaatgaatatgtattctagcaaaagaccttcctcaatgagattattcagagatggaaaaccagaatcaatgaagattctctcaagtcttggtgcaaattaaaaccttgtgactggagcatccttgtaatctaaaaataggagtagaaagaagaaaagaacatgttttgtgtgcatggtgtgtggctgatctcaccctttagtggtttgggggccgtaggctcctccctgcgtgtttcttcagcctcatcacacaatcctctttctatctcttactctgttgaagtgttggcagcctccaaaaacctcctctagtccaagttctaccatcataccatttccttatctaatatccatggagtgtctagtgtctgttgcaaaccgggtatctaagatgaagcagtacaacccaaactgcccagtgatggcagacattgcaaaaacatgaatttgcaatcacagtctctattttgtgtttccagtagaactggaagaatctgactcttctatttttatttttgctgcttttgaatgactgtaatgtggcaccattaatttttttttctcctcttccttggcagcatctcttgggcagtgaacagcagtcttctgtccagctctgggtctcctttggccggaagcccatgagagcagcccagtttgtcacaagacatcctattaatgtgagtggggtctgcttgaggatgggaagaagtatcattgtctttatgcagaggtcagaggaaggttgttgcagggatggcctgctggagtggatattttatggcgcctccctgaagtcaggtctctagagagtgcagctatgctttgggcatcgtggtctgtggttcccacttcactgaagcagagctgaacgagagacttagtttgctttaagtggagcagcactggcagagagaggttcgagccagagtcagtgccatctgagcaacgtgccagtactgaagcaatgggaagtttgtgcatgataggatctttttttattaagtaactgctggattgcttgcaggggatgaattccagcagaggataggatttgggtcccaccttttagaaacaggctggagagactaaaaactgagtagcagaagaaaccagacataagcaaatgcttaaatatgcagctttataacatgaagatggataggaaaagtctgcatgggatgggtcattagaggagctgccacagggagacggtcacagtgaaacgtcttgacattggcaggtggtttggtgaaaggtaagtagctcacttacttaccttccaccaaatgagtgggatcatacggagaacagtcatgccagtcctttgctagtttctatggattctgctttcctttggtcaccttaggaaaaataaagggaagtgcattaacccgtattgtactttgtacgaatgaaagttctcatgggaaaatgagggagacattattaacggaaagaggtttgtaggtcatttgtgcagtgcagtggcccattattttgtgccccatttgccagtaaggggcccgctaagctgcagatctgcctcaggttctccaaagggaaagtcgccaaagcttctttgccaaggttagggagcttcccgtgggctttaggccaacattcatcgctagaacatttgaaagtcattgcttccgtgtgtatagtaaaagcccacagggcacatttgttttttgacgtatcttttttgacttttgattccaaaggaatattacatcgcagatgcctccgaggaccaggtgtttgtgtgtgtcagccacagtaacaaccgcaccaatttatacatctcagaggcagaggggctgaagttctccctgtccttggagaacgtgctctattacagcccaggaggggccggcagtgacaccttggtgaggtaaggagactgtgagtccttctcctgccttcttaggccaacacaaccattagcttctctctggttctgtggttttcaacattagctgcccatgtggatacacccggggagctttcggaaacccgatgcctggctcacgtgcgcagagatcaccatgggatgggtttggggtgtggccaggttatgaggatcttaagaagcgccctaggtgattcttacgtgcagccaagtctgagaactacagctctaggtaacatttagggtccgagctactgtgttaatcacttccttgagctgcttttgttcagttttctggttttgtggtttctgagcagtgaaaaacagcacttggtaaatatcagtcagtgagagctggcatatgcggccagtggatcaggttaattgatgtcattactctttttaagagataatcggacggtgttttgtaaagaaaggcaccaacgtcattgatcctttgtctgtaaatcatgtgtttagagctgttttgtagtccagcagtgggcggtctcggagcaccacacccatcaaggggtggtggaggagttgggggtttgggagggatgaattggttcttaagatccgttcagggccatttattctgatttgtcgtttgacaaccagacttgtgtgacctgtgtggctgtggttagagtcccctctgctcttggaaagagtctcccgtgtgaagctgactggtctggggtggggtctggctctccagccatgacaaccaggtctgagggcatgcccctgtgcccactgtttctgggcaattcattccgttgtcagtttattcacaggtatgctgctgctctctgccagacagtgttctaggtatagccacaaagtaatgtatgaagcaataaaatatcagaacaaagtccctcttccatggagtttgtattctagttggggaagatagaatataagcaaatatgtgatctgcctggtaacatgttgaaaagaagaataaagcaagatcaggggatggggatttgcaacggtgttcttttattctattggctgcttcaggagggggacatttaagcaggtgcctgaattacatgagggaaggaaccaggcagacccctgggggagtagcgctgcaagcagggcagacaggaagcacagtgactctgaggctggactgcactggtgttttaggagcagggaggaggccagggtggctggaagggctgcagagagggagagagaaggaagaaacaggacctaagagagcagggctcagatcctatagggccttcaggggcttgtgaagaactttgtttttttcttttttgttgtttttgtttgtttgtttgtttttgagatggagtctcgctctgtcgcccaggctggagtgcagtggtgcaatcttgggtcactgcaaccgccgcttcctgggttcaagtgattctcctgccttagcctcaaaagtagctgggattacaggtgtgcaccaccaggccaggctaatttttatatttttagtagagacagcaccatgttggccaggctgatctcaaactcctgacctcaagtgatctgcccgccttggactcccaaagtgctgggattacagatatgagccaacacactcaatcctgtcttttccttcgaaatgagatggaaggtttagaccaggagatggacatgatctgatttaacctttcaatttttttccgttaaaatctgtgaattgcattatataatgaaaagaatataacacataaatggatagtgttctaaataattataagtgagcactcatgtggcttatcttttacaggagttatcctcaatgctgtgtgggaatttgactactgtgactactgtaggggacaaaggtgggaacaggaagactagttgtgaaagtattgcagagatacaggccagtagggatggatgttggctggacccagggtggtcacactagagacgctggaaatggtcagaccctaaatatattttgaaagtagagccaatgggatttgttgatagatgggacgaggggtacgaaaggaggaggagccaggggactgctactgcttcacccgagctgcctttaaagagatggccacacagggagtcagggagagctggggcaggggcaatattggggggagatcaccagcttggtttgggacttacctggttggagaggcctattggatatccatgtgcccagccttctacctggcctctgacagtgcttttccacttcctgtttcttctcttttggaggtgctgtcatcttttattcctttcctcccctgacatagactcatggattaattattatttaatgtgttataaaccattcctgccatgatacattttgatgctcagcttgtcctggtttggtcagtggcggaccctacctccttctgtttggttcttgtcgttttttattgaaaaaattatttactggccgggcatggtggctcacgcctgtaaacccagcactttgggaggccaagatgggtagatcacgaggttaggagatcgagaccatcttggctaatgtggtgaaagcccatctctactaaaaatacaaaaattagctgggcgtggtggcacgtacctatagtcccagctacttgggaggctgaggcaggagaaatgcttgaacctgggaggtagaggatgcagtgagccaagatcgtgctactgcacttcagcctgggcgacagagcgagactctgtctcaaaaaaaaaaaattatttattgaggtgaaatgtatataacatcagcttaactgttttaaagtgggcaattcagtggcattcaatacatttacaatgttgtgccaccgccacctctgtttaatttcatggccttctcatttctccaaaagagaaccccatgcccattaagccgcttctctccaccgtccccttctcccagcccctggcagccgtcagtctgatttctgtgtctgtggatttttccctattttacaggatgtttcatataaatggaatcatacaataatatgtgaccttctgtgtctggcttctttcacttagcctaatgttttcaaggttcatccgtgagtaccatatatcagtgcctcattcattttaatgggtgaataatattctccttttaaaaataattaaaataatgaatcactatccctcagacctttcactgactctttaatttttcttttttcaccattgaaagcccctggctgtggaatggaaaagtcacagcttgctaaatattttctcgtcttcctcatttgtcagatattcagggtgaatgtttcatgctgggacagagtatgagccagaagccagagcgatggccctttacagagtcatgaaggcctcccctccttgcctgagcgcacagtccagtgaagaaactggaaatagattcacgtcaagagtcataggccaacgtcccactcagttttctcattgttctcagattttatctgaggactagagaggttccattatactcagttgagtgatgttttgtcatctgcatctcaatctcagccaggtgaaatgggataaaggtgaattagcacatcgtgtgggcaggctggtttagagtaaactgctatgtgaaatgagcaagtctttgaactgaataggaaagagtggtgtctgggaactgcttctgatttactcagagacatggagaaagagctctttctagggaatgaccctggccctggtgggatgtgccaggtgggagtctcatggaaagcactagctagatgttggatgctttggaggaactaatgtgctgaggagatgtcagccccgtgggtcaccttagggaggggcatgggcccagttggtgggggtattgccagggcatggattctgcactgagtggggctataggggacctggtgagcttcctggtaagccttggcccagggcactctgggaagaaggggagaagtgccctggggagggccagtgaggataaaatggaagaaagtagaccctcagagaaagtacttagggtggggcagattgttgcagggcaggtcaagtgggggaaaggaaaggatgggctgggacttctggtgaaggagcatgtgaggtacaggaagacaggcttctgcttagaagtaaaagataaaactccaggaatccgactcgggaaagaaacagggctcatctaaatgagagaaactcaggcctcccagatatctagaagaagcccataaccagtgggatgacaggtttatgatgataaccctcagagaggtagagcagaggtcagcagagaaggaggaatcgagaccttcagctggttcctaaggaagcccctgaaaaataactgaactagacctaaggaaaccacatgtcagagaatttggtctcaactccagcatttcattcggcactctgctcagtccctcagcctgaagctgctttggtggggctcctagtgttccttttcctgcctcagaggttgttgtttgggtctttctgtctgaggtggcagggcagtcatccagctgaagagattgtgtggagatggttgatggaggacagcgtttctcggctttattgtgtagccggtggcttagaacccctgaagtaaagggcaagcttccagtcttttttctttttctttttttttttttttgagttggagtctcgctctgtcaccaggctggagtgcagtggcacgatctcagctcactgcaacctccgcctcccgggttcaagcgattctcctgcctcagcctcccaagtagctgggactacaggcacgtgccaccatgcccagctaatttttgtattattaatagagatggggtttcactatgttggccaggatggtctcgatctcttgaccttgtgatctgcccccttcagcctcccaaagtgctgggattacaggtgtgagccaccatgcccggccaagcttccagtcttaacagccacctatgaaccctggttacaatttctcagagatccgctctatttgtaatgcgtgtatcattttagcgcaaaaccacttccctgtggctgtggcatcagggtatccgcatggtagataaagcctgggaaacccatattctctctctctttttttttttttgagacggagtctcgctctgtcgcccaggctggttggagtgcagtggcgcgatctcggctcactgcaagctccgcgtcccgggttcatgccgtccatattctcttaagaatataaccccaagctttctagagccatccttgctatatgtacagtttctttaggaaagaatcgacaggttctgctgagcttcctgacagaaaaccctgtgggcttctatctgatcagggtgttggataattaggttgtaagtacctggagaggggctgtgtaaccctgagctaggttcctacagattgggttgaattttaagcctcagcactgttattaatgtcttgcaagtctgacttaatgatttctgtttttgaaggctcactggaggatttggagtcaatttcgttagtgatgtaatagatgtgactctttcgtcaacttttgtatgttatattcatcattctaaaccccctgttaggaattgttggtcagacaagccttttgaccctaaaagttgaaaagaaacaaattttttaaaatagcagattatctggctggacatggtggctcatgcctgtaatcccagcactttgggaggccaaggcaggtgcatcacttgagctgaggagttcaagaccagcctcggcaacatggcgaaaccccatctctaccaaaaaataaaaaaaattagctgggcatagtggcacacacctgtagtcccagctacttgggaggctgaggtgtgaggatcattgaggatcatctgagtctgggaggttgaggctgcagtgagccatgattgcaccactgcactcctgcctgggcagcagtaagactgtctccaaaaaaaaaggaatgaagttctaacaatgtgctataatgtggatgaaccttgaaagcattatgctaagtgaaagtaaccagatacaaaagaccacatattgcagattccatttatatgaaatgtctagataggccaattcataaacacatggagcagatgagtggtttccagggcttgggaagggaagaggaaatggagagtgactgccagtgggtatgaggtttccttttggaatgatgaaatgttctggaactagatagtaatgatagttgcacaacattgtgaatgtgcttaatgccacaaaattgtatacttttaaatggtcaaattttatgttatttacaataacaagcaaataccaattcaggttcatagctgtttattttcatattgtaggtattttgcaaatgaaccatttgctgacttccaccgagtggaaggattgcaaggagtctacattgctactctgattaatggttctatgaatgaggagaacatgagatcggtcatcacctttgacaaagggggaacctgggagtttcttcaggctccagccttcacgggatatggagagaaaatcaattgtgaggtattgatgctttaatcttcttttgctttttaatataaaggaaagagccctgctctgtggtagtttcctatgtctagtatttattgaaaaaatacaagatcacatggtattctattaatatcacatggagcagacttctatttgtgttgctacacttgcagttcccaaactctgctccaaggtcttgctaccacttctgggcagaagcaactcagaaaaaaaaaaaaaaaagtagtattcgtttttagtactacttgtttagttagaccattacttggtcttttggatttttgaattttgtttgtccatggtgggctatgtggacactcccctatataatgtatctgtggcccttgggaaaattcttttggagactcttaccttagaatttacttcttggtttttcttctctatttggcaatgggtcttggcttaccacatcaaatctaattttggaaagaggcagcctataaatggatatagacaaatatctgggtacttcctcttccctcaatagtgtcttctacagcagcttggtgagatcctgggatagttggggcttgggtgtttttgagcgtgctgtgggggtcaggctttagttaaatcgaattaatggtatcattcaaattcagctttctgtttccctgactaatcagtttatttatgaactgtcgttcatcagctttaggtataggtttcttcttctgagtttaggtggtggaaggaatgtataggaaatgggtaagtctgattacctgaggttacagaaactcttcaatgaatagacttccttgcaggcagagaagcatgagtcagaaagaggagtgagcaaataaatatttctttgagacccagcctaatttgttccagttttcattggtcaaactgagactctagcaagacagatacttgttagagatccttttatgacaaaaataagtagcaaataatccagcaaaccttgctaccatttttacctgaccataaccacataagcacatagtcctcctgtgcagaaccctggccacatctgagtaacattgaacaagctctttctgaccaggagaactgagtgtgaccatatggcaaagggtgttgtcctgattgcttgcagagctatgaaaatctggacatgagtgatggaggccagactgaatcgcttgaagccttgccctgtatacctacacctttgtgcaaatgtaaaatacataggaaaaaatttagtgctaatcctttgctttttatatctcattgatactgtacatcaggggagcttttccatgagacttatgacttctgattcttggtctttcttatgacagaattgctggaatcatgtttgaaatatgtctctgacttagaaagtgaatatgacaaaatcatttcatttctctttagttctgagtcacttgagaggatctctgagtgataggatgagatgatgactttcccatctacttgagttgacactgatttctaattgttattccctgagagtctcagaaggcctttttaagttgtaattgttctcttcttccacgggacatttatgtgggttcagatgatcctctctgtctggggggtgtggggacagctgggctgtgagtctggtttcccctgggccaggcctccttgccccgtgtcagctgcactcccctcacacaggccgcagggtttacagggaacgctaggcatggtatcatgtgctgacactgcctgaaactttggttgtatagctttcccagggctgttcccttcatctggctcagcgcctcagtcagctcctcaacctccagctccggagaatgcccatcctgtccaaggagtcggctccaggcctcatcatcgccactggtaagtgtgcttgcctgttctcaaaaggggttcagctgtctggtgatgtgcaggccaaatgcagagcgatcacccacacctccagcagtaaccacgctttgtggtttgaaagcattcttagttgctagatactacgcagaatttctggctgggcaaggtgattatctgacatattcttgaaattaaaaataattatttctcttgcattttaggctcagtgggaaagaacttggctagcaagacaaacgtgtacatctctagcagtgctggagccaggtggcgagaggtcagccccctcccccaatcccgtcccctccaccctcattcccatttgtgtgagaatgtagactgtgccttggcatttcagggacacaaatggtccatggcagagaccagtaatgccagatatgactataaagtaaagaaaggtacctgaagccactgatttatatccacagttactttaaattaaacacagacctttgcaaatgtgtgaattttactgaacattctaagattatgagttctatgagggcaaagacaatgtctgttttactgacttctttatccttaggacctaagagtgcctggcatggagtgggggctcagggcatatatgctgcatgtatcagcaaattatagcgtagtggtattagccctgaaatgggctgctattattattattattttgtatattattgaagttgagatgaagcctgtccttgctgggctatgttgtataggcactttcgtctcactctgtgctatggaagtagactctctttttgccttaaggttgtataactaatatcgatgctgattataccaattcctaagacagggctagttccctagttccaaaatgctaattcatcttcatctttgggcattagagaatttccaaacttgtaaaaaaaaaaaaaagttgttgccagcctcccattgattaaggccaaggaagtgcgtttggtctcgttctgtaggggttgctttcaggggtgaccctctagttatgccaggagccaccagggtaaaacccaacagatcacttgacaggatgagcaccttgtcatcgagcagccccgcaggctgggcagccggaacagcacgtcgggagtgatgtggagttctcagaacagctagcagacatagttcccatccacgtggtgctttactgggaatgcaccatgctcaccttgatatttgaataggtaatatgtaaagcagtaataaaaataccaacattcatttggcaccttgcagttcacagaggcctgtcacaagccttctctcactgtggcagggcttcccatccctcccgaggagagagatgaggctcagacactgtgtactgtatgtggtgaacgcaaatatgtgttcagatgaggcagattgttaaggccattgtagtcagagtgcaaacagtttgaatggaaattttcgggttgtccttgtgcagctcccaagggaagattaagcagctgctttcccctttcgtggagctggacgctccctttgaaatggggtatcctcttctctgcgaataggcctgtggtttgtttgtgccttctgctgttggtgtaatctgggatttgcacatctgcaagtgatttccttctgggtagaaagcagtgtcttgttcctcctccagtgaagtggtatcgtctggtgattaccggggcagctgtcagtgcctccctccacacgtgccttgtccctgccaagaagcaaccagtgcataagagaccttattttgggacatagcagaaaactaacttggggatgaaaagattgtgagtttatctgtgtgagtgggcatctgagtccccatgggcagccttcactttagagggacaatctgggctgtgtgcaggagcaggtggtggcagaggaagaggctgtagtggacagaatgttgcctggagcactgatgactgtaattgtggttttctttttcctcctaattagttgtgcaaattctctgatcctcagaattcctttttttgtgcttttttctctttttaaataatttttatttcttttatttttagcttttttctttatcaactttattgaagcagatgaaggcacagtacactgcacatatttaaagtgtacagtttgatcagaattaattatggtcaccacaattaagataacaaacatttccatctgcaaattctctgatcctcagaattccgtttttgtgctttttttctttttaaaataatttttatttcttttatttttagcttttttctgtaacaaatttattgaagcagataaggggacagtacactgcacatatttaaagtgtacagtttgatcagaattaattatggtcgccacaattaagataacaaacatttccatcaccctccccgaggtatctttgtgcccctcggtaatccatcccactctccagtcttgtccttgtctgcttctgttattcattggcattttctagaataggttattcattggcattttctagaattttgataagtggactcacacagtatatactctttttgcctggcttctgtcacacatcacgatgattttgggtttcatccaagttgctttgtgtatcaattgttcattcctttgctagttgtatcccattgtagggatatatcataatttatttattcattcatctgttgataaacattccagttttgctgattacaaatatagctgttatgaacattcatgtacatattttattcatttctctagggtaaatacttaggaatggaatagctgggtagcatggtgggtatatgtttaactttttaaagaactgccaaattattgtcccttttacatttccaccaaacagtatgtgagaattttaattgcttcacatctttgccaacacttggtatgattagtctttttaattttagacattttaataagcatgtgataatatctcattgtagttgtaattggcatttgtgtgattattaatgattcttttcatgtgctcattggccattttaaaatctggttgtgaagtatctgcccaaatcttttgcctttttgaaaaaattgggttggtccagcacagtggctctgcctataatcccagcacttcggacggctgaggtaagagggttgctggagccatgggcaacatagggaaagcttgtctctacaaaaaataaaaatagccaggcatggtggtgcatgcctgtagtcctagctagttaggaggctgaggtcagaaggtcacatgagccctggtggttgaaggtgtagtgagctgtgattgtgctgctgcattccagcctgggcaatggaatcagagcctgtctcaataaatatataaataaattttaaaaactaattttaataattgagttgtctatcttctttgagttgtaggagtttttttaaaaatatattttggattcaggtcttttgtatgatatatgggtagatactcattttttccatatggagatctaattgatttagcaccatttattgaaaacccttctctctctcccattgaattgccttggtacctgtttgaaaatcaattggccatatatgggccaattttaggccaattgggtctatttcaggtctttattctgtcccattaatctgtctgtcttttcactaataccaaattatcttaatttccaaagccttatagtaaatgttgagatcaagtagggtaagtccttcaactttgattattttaaaaatctttttttattattgtaggtcgttcgtatttcctgatacatttcaggatcacttgtcaatttctatggaatctgctgggatttttattataattgccttgaatttatagaatcagtttggaggagaatcgacatgttaatactattgagtcttctgatccatgaatgtagtatctttttccatttcttgttcaatttctctcagtactttgtagtttccaatgtagaggtcctgtacatcttttattagctttattcctaggtattttaattttttgtggtattactgtaaatggaattttattttctaatttttgctctagtatataaaaatacaactgattttttatatattcatcttgtattctgtgaccttgctaaggtaattcattagttctagtaggtttttagattctatgtaagcaatcataccatttgcaaagagtgacagttttatttcttcctttctgatcttaatgtcttttatgtattctctcattcttctcttcttcctttttctcttctttcttgtccttctttcttctctttccctcctttcctccattttctcccttctgatttctttcattcttcttatcacaatggctaggacctctatacagtattgaatagaagtagtgaaagtgggcattcttgccttgttctctctctgggggaaacaattcaacctttttaccattaactatggtgttagcagtagatttctttatcaacatttgggaagctccctattatcactagttgttgagtatttttttttttatcataatcagatactggattttgtgaaatgctatttttacatttattaaaatgatttttttctattactatgatgattaaatattacattaattaattcttgaatattagaacaacctggaattactaggacaaactctacttggtcataatgcattattctttttatgtgcagctaggtttgatttgctaatattttgttaaagatttttgcattatttgtgagagatacttgtctttaatttgtttttttttgtaaaatctttctaaagttttgatattagtgtttggctagtatcataaaacaagcagaggggtaaacccctcttcctcttttttaggacaaagtttggtgttattttttcttgagtaattccctaatgaaactgtccaggcattgagttttctttttgggaatattttttgataagagatttaatttctctggttgatacaaggctattcagattttcttctttttgtttcaattttgatgagttgtgtgtttcaagaaatttgtcccttcatgtaagttgtgacatttgttggccttatgttatcaatgatatattctctttatctttttaatgtctgtaggatctttggtgatgatttcattcttgatattggtgatatgtgtattttctctatttttcgttcgtttaggtgtttcaatactgttgatctttccaaagaatctgcttttggctcttgttgattttctattgtctgttttctgttttgttgctttttttctttattattattttttcccttatttgttttgttgttctttttgtagcttattaagatataaccttgggttattgattttatatcttcttttctaatgtaagcatttaaagctgtaagttttcctttaagtactaatttagctatatgccacatatttagatatgtttttagtgtttttaagttcagagtatatttaatgtccccctttaaaactgagatataggctgcacacagtggctcatacctgtaatcccagcacttaggaagaccaaggcaggaggatcacttgagaccaggagttcaagaccagcccaggcaccatagcaaaactttgtctctacaaaaaataaaaaaattaactgggcatacctgtgatcccagttactctgggggctgaggtgggaggctcacttgagcccaggaggtcaaggttgcagtgagctgtgattgtgtcagtgcactccagcctgggtgacagagcaagaccgggtctcaaaaaaataaaaaaacagataaaattgagatgtaattcacatattataaagttcaccattttaaagtgtacagttcatatgtttttagtattattcagtcatcatcattatctgattccagaacattttcatcaatccataaatatctcttgatttttatcttcgaatgataagttacttagcaaagtgttatttaatttgcaggtatttgggggtttcatagatatcttgttattgatttctaatttaatttcctatagtcagagaagacactttgtatgatttcagtccctttagatttgttgagatttattttgagatccagcctgtggtctatattgttgaatatatcacgtgcactgggaaggaatatgtattaagcagttgtttgaggtagtgttctgtagatattatttatatgaaggtggttgataatgttgttcagatcttttgtgttcatattgatttttgggggttctagttctctaaattcctaagagaggaatggtaagatctcctactatgattctgaaattgcctcttgctcctttaaattctatcaatttttgctttattttggtatgcattttgagtctctgttgttaagtgtattcacatttataataatattttctcatgaattgtcccttttatcattatgaactatctctctttatctattgtaatgccatgtgtcttaaaatctattttatctgatattaaaatagttactgtagccttcttctgtttactatttggatattacatctttttttgagttggtgtcttactctgtcacccaggctggagtgcaatggtatgatctcggctcactgagacctcgacctcctgggttcaagtgattctcctgcctcagcctcccgagtagctgggatttcaggcgctcaccaccacacccggctaatttttgtatttctaatagagacggggtttcgccatgttggttaggttggtcttgaactcctgacctcaagtgatccacccaccttggcctcccaaagtgctggggttacaggtgtgagataccacgcccagccctggatagtacatcttttaacatccattcgctttcaacctatatatgtctttatatttaaagtgttttttttttctcttttttgaagttgggtcttgtgtgttgtccaggctggtcttaaactcctgggttcaagtgatcctgccaaatagttggacttaaaggcacatgccaccatgcccagttctttgaagtgtttcttctagacaacatatagtagggtcttgcttttttactcattctgccaagctctgctttttaactgaaatgcttaggccattaacatttaatataattattgatgtatttgaatttaggcctaatatttcatttattttcttttcatttctcctatttattattcctctgttccttctgtcctctctccttttgtattatctagatacattaagtattctacttttatttagattttttggggggcttatctatgtgtatttctagtgacttctctaaggattacaacatacatatctaatcttttatagtcttctttgagttgataattgcacttaacgtaaaatttagaaccctttcaaccatacaagtcccttttctcctcccccacctatatgttattttcatatttatcacatcaacacacattacaaaacccacaaagcagtgtttgtttttgcttcaaattatcatatgaatttcaaagaacttaaatatttacccagatatttaccatttctcttgcttgctcttcgttctggaaaaatctctgtttacccatgggaaatttccctatagcctaaagaaattcctatagcatttcctgtagcgagatctgttggctgtgaattctcttgtttttccctcttttgaaatttctgttttatttaccttcattcctgaaggatatgtttattggatagagaattctgggttgacagtaattttcttccagtactttaaagatgtctactgttttcttgtttccgtgggttctgatgagaaacctctcttcactttagctatcattctcctgtgtgtaacatgccatttttctctagatgctttggagatttttttttcattggttttcagcagttttggtatgatgtgtctaggagggcttttctttgagtttattctctatgtagatgctgattttgaatctatatttatatctttcaacaaatttgggaaattttcagccattatttcttcaaatattttttttctgctcccatccctttctcctgttcttctcggactccagttacatattagacctactgttattgttccttgtgtccttggcaatctttctttctttgaaatcctttttcccctgtatgttctctagaacacacagatagatctgtaatttctacagatctatatttattttgaagttcactaattcctttgtcattgcttttctgatgttgagcccatcagtaaatttcttatttcggacattatatttttctgttataaaatttgtttggtttctttttaaaaattgtttccacttctctgggagaattcttttctctcattcatttcacgtgtatttttctttccctcatgggacatggttataatagctattttaaaattccagccaggtatggtggctcatgcctataatcccagcactttgggaggccgaggcaggtggaagcacttgaggtcaggagctcgagaccagcctgaccaacatggtgaaaccctgtctgtactaaaattataaaaatgagctgggcgtggtggtgcatgcctgtaatcccagctacttgggaggttgaagcaggagaatcacttgaacccaggaggcagaggttgcagtgagctgagattgcaccactgcactccagcctgggcaacagagtgagaatttgtctcaaaaaataaaaaattaaaaaaatattccaatatatgggtcacttgggattggcaccttttgactatcttttcctttgagaattggacacatcttatggatatgtttgtatgctgtatgttaagtaattttggtttgtattctgcacatatgaatgaaattcatgaaattaagccttctggaggatattgatatttttgtctcagcatgtaatcagcctgtttaggttctgaccctgagttctgtcttgctttctgtaggtggtagtttaactctcagttcagtatgctaagcctttgttacactggtttgtgtctgtttcatgcacgtacacttcaggggttaggctgcgacttgcgtaagttcatatacaaaattaggggatttacttttttgacactctctgctatgggattccatccacactttacctaccctataggggctcctttctctggttcctttgggggaaataatatctattgcagttttagctgtgactgagactgaggtgcaccccatgactgggacttttccttcgggcaaagctttaccaggatattcatgacttgtgtgtgtagcttctctaggttttaaatctccacaagcggcttgctttcgtttacttttcagcatccactggtagttgttttttgtccagagttttcagctgtaattagcaggaaggatgggctatagagggctaatactgtcatagtagaactgaaaccccagttacttaatttttaatcaagggttggtgggagtcatagatttggatttgagtcctacctctgctgttcacagtctaccattttaatattaagcccgtgtttcttcatttgggaaaaaaattgagatactagaacttgctccacctgtccctaggattgtgtggaacagatgagataatggatgtcaatgtcttctgtaaacggaaaaattgttttcaagtggttgtcattgctgttatgtctatgtgcacgtgtgtgcatgcctgtgggcatgtgtacatggtttctgcacaattacctccacagcagtggtgtcaccatggatttttcctcttcaggcacttcctggacctcactactacacatggggagaccacggcggaatcatcacggccattgcccagggcatggaaaccaacgagctaaagtaagtgtctctgatgaggccttttaacatcaaactttctcccagaaatttacgtctgtgattataattggattatctctctatagcactatgttgttgacagcacaatttgtgatctctggatatgagttaaacttttttttttttttttgagatggagtcttgctctctcccccaggcaggaatacaatggtgcgatctcagctcactgcaacctccacctcctgggttgaagcgattctcctgcctcagcctcctgagtctgggattacaggcacctgccaccacgtccggctaatttttgtaattttagtagagacacggttttaccatgttgatcaggctagtctcgaacccctgacctcaggtgatccacctgcttcggcctcccaaaatgcttggattacaggtgtgagccactgtgcccaccccgatttaaactctttatctcccaaatgggaatataagaacctgtcctttctatcacaaagggagattgtgagcaagagggcaattaataataatggccaaataattaagtggaggctctttaatttgtccttctttgctttgtgtctttattacatagaaagactaataataaatagcaataataataataataatacatcagtaacaattacagaatgcatacaacttgatagccattgacttttggtgcgttaggttggtggggggtctcatggagctggaaggggtgtttagggttaactgcatcatttcacagatgagaaaacaggctcagcaaggcaaagtaacttgcccagggtcattccctttgttagtgacagagacaggattagcacttgggtttttcgattgcgtcctacattctttgcaatatattgttctgaaaagcaaaactgtcaagagtttgtaacctctacacccttatgttctgattttatcagaaccagtcctctgattacctttggctcgtttctgaatggttcatgttaggtcaagttcatgctggaccacacttctccctgtttttgagctgaacccattagatggattggtgaaggatctggagagggcttctgtaactctcttgtttattgcaaggacaaagctttctttttctttgctccttttagaaacggggccagcagtaagtgagaggtgggtggtttggaaaaagagatcttagcagctgtttttttttccctgtggttaatttgacatgtgctgagcagcctggcctcagagaaggagagagaagcaaagtactggtgtttggcattccacctggctgttctctgttctgtgtagcactggttagctatttctttagaggtgatactccgaagaggtcctgtttgtgtgcaacactctgtattcatattcagattggtgtttgctcagacaacgaccatcacagagcacagtacttcccacatttgtgctatcatttatatacccattaatttaattttcatttcacatgttcaccaagcaccgattgtgccagatgctgtgtatctgtagatgaataggatgcctgccaccctgtagttgaaaggtgggcgacgaaacaattgtagtgtttggtatactgctatgtgtgtaatacgcacgtaggggacatagtttggcttcctaggaatacatttcattctttgtatggctttcagatttcagagtcagttctcgatttgccttgtttaacttctctgaaaattaaatttgcattccaaactggctcctctgaaggagttagtgtgattctagtcctcttacaccatctgtcggtgcatatgtgctcagggaacgcagcgtcattctgcacgagctggagcaaaacatgatcaggaaaataaacttgctgccagaaaatcataaagccttccccagacattttgaaatgacttgggggttgtagactttgggggattatggtcactgtagcattcctctatttgtataggtttcatttggaggtgtctgtttgaatagttcaaataaagcatttgaaaatacgaaaatacatacaagcctcctattgacaggtgcatgtgtcccacataacaacctgagcttggcctaaatctgtgtagccacctggcatttactcagtgtgttgttcacagaggtattttgcttcttcccctgctgctctgaaaagcaagaaataatattcaagttagttgatattctcagactacaatggtgatttactgtgacacccatgcacaaggacaggtggcttctgacaagactggatatctgttgctgggctagggcctcaggccccttctaagtttggcctccccagtcacagagatctcttttcctttatgactcgtagcatgtataggctgtcccattcatttggcattgatcatattctgactccttatgttagttacctttacatgatgcgcctgaattctgcaactcgttagtaaggtctttgtaggtaaatatttctgctcgatgtaggttaccaggcacttagcaaatatttgattgaaataggtcatgcatacttaatcatccaagattgcttatggtttttttttttttaactgatttataaaactagaggagaccgagctagtgtgccaattgcacagctccaaggggaccactgccactgtgctccatgtcaatgacaacccctagagcacagatgtgagtggaggctccctggatgtgtgcaacccggtagtacccaagagacaccagagatgacctaatctactttccttagttttcacatgagggaataagagattagtcaggagttaatgcccacactggaacttgagcatatttctgttaggaatcatttcaggtccattacacagacaactgtcgaacatctacaatgaagcggatgctgtgctggataccaaggatgcaaaggcaagtggggcactgatcgggagctgcctgtgcccactgtggctctgtgatgtttctgagccagatgcagagagagaggctgggaggagggggttgtttgaaagagggctttctgctctgattttactcatctttagggagggaagccaagtaaagtagcattagtaactcaaataggttgtagtggggacagcaattgaagcattgctcaaagtaaacattagggttttttttttttttggtcgatgttcttttaagttatgcatgtctttctctccctgattagcacagatatctaggagttgactgttatttgtttcagcttctgccttgagtctcctctgagactgttacctttgttattgttaattgaaattgagagcaagaagtggaacactttgttttgctcttgtgtctacatgtctgaaatgggtaaataagaacctgcactggggatccacttattcgttcattcagcccgctgctcctgtgaacctgctcacgggaggcataggagcagtggctttttcgtcagagaaggggctgttgcatttttgcaccctgaccgaagaagattcaaacacgtttgtcagcttgatcacggaagagaagatcaatttctgtttcttcgctgcggtttgcttgtcagcatgatgatatttttcgtagtcagtaataatattttgaacttgccccaaagcatcttttttttctaagacatccaatttcataggggcttctctctggaaatcctgaaaagcccctgaaaagactccacgcagcagagcagctgtcttttctggacctgggctctggaagcagccccacagttccagaatgtgggaggcagtggttaatgtcttcacttgcttgcagcgcctctcaatggtacagttgtcgggagagccacccctactttatcctaacccctgtggtttttctgccccttgaggtatagagaagcaggtgttcttatcactgtgtttttttttttttttttttctggagttcagtggtgcgatctcggctcactgcaacctcctcttcccagactcaagcggtcctcccatctcagcctcccagtagctgggaccacgggcaggagccaccatgcctggctaatttttatatctttttttttttttggtagagacaggtttcgccatgttgcccaggttgttctcatttgaactcctgagttcaaagtgatccacctgccttcctaagtgttgggattacaggtgtcagccaccaagcttggtctttatcaccttttaactgttaagaaaccgagaaacggagttgcagtgcagtttctttaacttccttcaacaagcgtttatgaataatgccctttctgtgtgctaggaaagattcgaggtgccaggggcagaaaagtaagaggtcttattcctgatgaacggcaatccagtagaaaacactcgcaaaatcaagtcactgaaatacagtgaggtataagattatggagagcgctgggtgcggtgggagccagaatgagggccaggtgatgctatctgggggacaaaggaggacttctgagagaggaaaccccagctgaacctaaaaggatacaaagcaaggtcggaatgcttttccaggtctagagagaccttgagcaagggccaaagcatgatcagtggggaatgtgcacggctcttgagtattaatagaatgcaaatttccaggtgggaagtagtgagaaacgaggctggaggaaggtatctatgtagaggccaggtcctgggggacctcacctgtgccttactaaagagattaaagtttgctttgaggtgatagggtccctttgaaggattttagtaggggaatgacatggctagacttgcattatagaatgatggatctggcagaatggagaggatggattcagtggagagagactggaggtgagagctgatgctggggtgtgtttgaggactaagtctgcagggcatggtttctgattcacctgggatgatgggagaagtgattataccgctcatagaaaggcagaggtaaaggagtaggcttgcagggctgtatattaaatgcagacatggacaggttgaattgaagcctctgttgtgggtccaaggggcgatgtccagcaggaatctggacatattacaatatctggtgcagccttccgccaccctttgcaagaattttctccgtgccatctgtgatagacaatcttttgttctatacttgaacatttctattaatggggaatttgccatatcaaaaggtgcttccattttactttgggacagtttgctgttcatttgttcactaattcatttgtgaattaaagttctctggtaagggagagcccagattctcctccctccagcttctattcgtggactttgttctgctccctggagatgcacagtagatacttccttttgcatgaaagcctttcaagtatttaaggaccctgtcatgttctcctgagtgtctgccatttcatgatgaatatcctcggttcctttcctcatattctatagatcctcaatctctatcttctaggttctcccttaggtctgcctcacgatgtcagtgccttaaaatgtggtacctggatctggccccaatagcctgaaacatgcagaagatgttgagattttgtcttcatgattctgaacactctgtatctattaataaaaacctctgacagtgtttccatttttaacagccatctcaaactggtggctcctatttttttttttttgagaggaggtatcatttgcataccacaggatgctcagatattgactacaccatttaatcagttctgaagggtgcatgtcaagatgtagagtatttccatcagtccagaaaatactcacgtgcccctttccagtcagtgctctccacccccaaacccctgccccaattacaggcaaccactggtatgtttatcactgtagctgcctattccagaatttcatgtttgtatgttttgtatttggcttcttttactcagcataatgattttgagatttatcaatcttttaactggtatcagtaggctgagttcactttaactaaaatacctgagatccttctttcttatggatcttattatacaatcaatcaatcaacaggacggatgttccccgtcctgtatttgagcaaacaggtttttgaaactacatgtggagctttatttttatttttgcttatttttttttggtttgaattgtatttttggcatttatttatttttttgagacagagtctcactctgtcgcttaggctggagcacagtggtgccatcttggctcactgcaacctccgcctcccaggttcaagcgattctcctgcctcagcctcccgagtagctgggattacaggcatgcaccaccacgcccagctaatttttatatttttagtagaggcggggtttcaccttgttggtcaggctggtctcgatttcttgaccttgtgacccgcccgcctcagcctcccaaagtgctgggattacaggcgtgagcctctgtgcctggccccggcatttattatattatttatacaattagccttttaccctttgcaaatttggcagattcgccttccagatccctatccagatcattgacagatgtgttgagctctgtgagaactagaagtcttatcttgggttgagatcaaaccatacgtcagcactcttgggatgtgcttattttaccatcagtgaattttatctgactgcgtggtccacaaagatcttcatgaaaaaaagaatgttctgtgtcattgtcctgtttttcaaatcaagaattaccacgaggaaaggaaatggagttagtctgttgtgacttgtgtgtgaaaccatttgggttcttagccttgacctccttttcgtctgagtgctctcaaataaactgtttcataatccattcttgaaaccaccttttcttcattaaggaaataaaagtattttccctattctagtttttgagatctttgttcttcataattctcctagagattattgaaaaggatgctataatcatcctatctttaagtctttcagttccttagaatttattttgtactgattttcctttaacttaaatggtttttcttgtccaatttgaagattattttccttgataaagataaaagcaaaatagaattttttttctattttttttagacccagctttactactatgttgttattcaaagatttttttctttttttttactaacgaagtctttatttcttttgttttcagctttccaatcagccagaaaacataaagtattttcaattcaaagttctagtaaagataggaagaactgggtgatggttttcataaatgaatgaatgaatgaacgaatggatgaatgtgtatcaagtgctctgtttttttaaattgatacatatgattatgtctgctattatttattctattggccatcagagcaatgatcctattcctttctaattctttatagaacttgccagataaccaatccactgacccaccagtctgccaattattttggtaatttgaaacataaaccttgattcattttgaacttatcttgctactattccaacagactactggctatgagaattacagctggaattagctagcagtaactgaatttgttgctcttggttatatgaccttttttcccatcttgaatatgttctttagaaacctgaactcatcaggaacttttctgggtagctgcctgctagagtcctaagttgggtatctaccacacttcttccttttagagtatctgtggttatattatgttttattattatattatctgaccttcccatcttcttgagagtttttggccctgggattatgtctatatttttatctgaacagtttgatttcttcattcctaaaggctagtgccctatatcctctttcataacttaagaatgcaaagatgggccagacgcggtggctcacgcctgtaatcccagcactctgggaggctgaggtgggtggatcatttgatgtcaggagtttgagaccagcctggccaacaaggtgaaatcctatctctactaaaaatacaaaaaaaaaaaaaagaatgcaaagatgactttgtttcttcacaaggttcttgtcacttacttttaccaatacaagttctcctttgggggtcagaattcagtccaaaatgcgtgttctcttaactgttgctgttgataagacaagagccttttccccaaaattctgaagagcaccattttctaaatgagcagtgtattttcagatacaagctatgcttggtcatgtacctgcttgttatttcattaatgagttattgtcagagtcctctgggaactctcaagaaatggggtgattcatttcctgaggttatgttgggttcgaggagctcttaaagagaattaacttggcaacgtacacatagatagactttagcattaccactgagtgggcagatggctgccatcatgtctggataataggttgactctgttggttcagtttgctttaaaagtaatataaacctttagcttcacactggttacaagaaggagactgaatgagttaatttatccaaatatctgtttcaaaattttcttaaaccaaaagcatatctgccaggtgagatttctccccttgtgagagatttgtagggggagattacttagtctcccattgacatttattattctgccttgtaaccctaccagttggtttaacccctagcctttttgtagcagtatcttttttttttttttttaaggcagggtctcgctctgtcatccaggtgggactgcagtggtgcagtcatggcacactgcagcctcacactcttggactcaagcaatcctcacacctcagcctccagagaagtagctgggaccacagggggcaccaccacacgtgactaattttttaaaaaaattttctgtagagatgtggttctcattatgtttctcaggctggtctcaaactcctggcctcaaaagatccttctgccttggcctcccaaagtgctgggattacaggcatgtgccaccacgcctagccaaatcgattttaataatctcaatatgagatgaagtgtttggatagaatgatgtcacgaaaagatttctgtcaaggattagaatcccaaaggtgtaaaactaaaatctcaaaaacatgagaaaggtgaaagaaaaagttttgcatataatttggatttaagaaggacccagaagccctgtgattctaaagaaggcttgaattgagtgatttctcatgtcaagcgtctcaccagctcactgggtgataaaacaagtgttgggcagattttcttccttgcctccctctccgtccctcttctccttcttcgacaccaaagataatgtaaaatcagtgcagttactcaaatgctgcttagtttttcaagggctggcttcctgcttctgttatagtctgtcttggagactttcctcagtatatactttccttcaactttttactttttaatttctaagaccacgggaaagttggaaaaaccgtataacgaacacccatgaaaccttcacctagagtcacaaattgttagcatttgccggtttgctctacttctatcattggtctatttatctatcctgtgtatccatccattattttttagctgaatcattttaaagaaagttgcagacatcatgctccctcacagctacttaaatgtgtatctccaataaataagggcattttcctatataatcacaatgccattctcacacctaagaaaattaacatgaactcggtatgacttatagactatattttctcagttgtctcaaattatttatggccacttttccccttcaatccgggatttagccagtcctgaactaaatcctggattggatttacacattgcaaatttgtttagtcattgcatttggcttttatactcctttagtcttttaaaatctataacacattatctgccttttttctttatttatttggtttttgtggccttgatttttttttgaagaatctggagcagttatcgtgtagaatatcccacattttggatttgtccaattgtatagaatagtacacagaggatgtgttattctcaatgctttattcaggaggcacctaatatcaagttgtcctgctattgatgatgtttagttaagattgtgactctctgatcattcattgtaagattatgttttgtaaaattttatttccccatttgtagtgaatgatttgtctgttcagatcatctgaacatcctggccccaacactttcaccgaatggttttagcatccagtgatgatccttgtgtgatttagttattgcagtggggataatttttctgtaattatattatattatattataatatatatattgttgtgtccaacccttattaagtgccattctaatataagaaaaaaattgggggccagacacggtggctcatgactgtaatcccagcactttgggaggccgaggcaggcggatcacgaggtcaggaggtcgagatcatcctggctaacatggtgaaaccccgtctttactacaaatacaaatacaaaaaaaaaaaaaattagccgggtgtggtggcgggcacctatagtcccagctactcgggaggctgaggcaggagaatggcgtgaacccaggaggcagagcttgtagtgagccgagatcatgccactgcactccagcctgggtgacagagtgagactccatctcaaaaaaaaagaaaaaaaaaaagaaaaaaatttctcttttgctcctctgtcttttagtatcattagagacccatgtcctattttcattcaatgtgtaatctgttaccatcatttttcttttttatgtttgaattctcctaaattcggccagttggagccccatcaggctggttcctgtgttcttttgagatgactgcatttatttctgagcatttccttaaactttccctgccttagcccaggatcagccatttctccaaggagccctggttcctgttcctggtgaatgttatatggaaaccaagcctttgccttagagactttcactgcaaggattctcttacttgcatttgggcagatacagtaccaatgaaggggagacctggaaaacattcatcttctctgagaagccagtgtttgtgtatggcctcctcacagaacctggggagaagagcactgtcttcaccatctttggctcgaacaaagagaatgtccacagctggctgatcctccaggtcaatgccacggatgccttgggtaagctgctgcctccttggaccttttcacatggatatgcgtggacttcctgttatgtgcaaagcaccagcttagatactgtgtactcagaagagcctgacattcattgggggagatgggcccataagagttagcaaaaagcatagggaggtaattgaaggcctgctcaattcttcttagtaagactgggtgctattctttgtatcttagtttcctcatgcagttcctggcacataagaagtttaaatatatgtctgctgaatatgtagataaatgcatgaatgaaaaacatatttccaaatcagcagtgccaattggacgtattcagtgagtgtgcctgactgtctgtaagtcagtgtgccaagcgacacagggtcctctcaaagccatctaggatctagttgtgatctgctaatctagatacaggatgcataagtatgcagggagaagtgaaactcttcagcatcctctccctgcttccccatcttatcttaccctttcctacctctcagccttggctaacctgattctagctgcccggagtgccctgtttcttctcatttccacccgttcagcctcccctactcgaaatccttttcatatctcaggatccaacacatttgtggctgatatcccaaccagaagacgtctcccttcttctctatgtccagaacataagtgtatgcataactttgtgtctgtcactcggtgtgtttcaccttccattgactagattataaagcccttaaagataagaacttgccctgtgcatatttgtattgtacctactggaaagcctgatagcctaacagtctgtaggagtttaataagtttactgatttgcatggcattgagtcaaaggttgtgtatcagcttcgggtagtatctaatctgactgaagacacatatataagagacacaaagtgccaacatagacataggcatactttggaatgcttgtagaaagcaccctacttagacatttcgatgaacgtggcagatggagtgatggtgcaaggtatcttagcattttccagcctctttccatggagatcctgtaccttcaagtagggccagcgagccctccattgccttcgggccacactaccagatgtgccctcactgcctgaggaagcaggccaggaacattaacccccaatggtattgctcatcaaggattcagctgttccctagttctctaggagagaaacacttctgagtactcatttctaaagggcactgctgactcttctgtaatgtttcggaaatttggatagtgcctaaaggtggcttgcttctttccaacttttccaggcagatgcctgcgtttcaggtatccttttcattggcatagggctgcccagcttcaaaacaagctgattggagggtctgtgtgcttgcggggtggcaacagatagacaggaagtgggggttgaggccaggcaccttgaggcatagcaggaaaccctacatgggcctgcctctaatgcttcgtgctgtgttcctttttctttaggagttccctgcacagagaatgactacaagctgtggtcaccatctgatgagcgggggaatgagtgtttgctgggacacaagactgttttcaaacggcggaccccccatgccacatgcttcaatggagaggactttgacaggccggtggtcgtgtccaactgctcctgcacccgggaggactatgagtggtcagttcttctttgatggctggggactgagttgtgttttattcactcagcagtgttgggggaagagattaggcatggtccctttccctgagcaaaggaagggaatagaaggaaacaagtatttgtgaagcatcttttatgtgccaggaactgtgctaagcatgtttcatgtaagttgttttctttagttcttatagccaggtaatgcggtagaggtgtctaggagagctgcagctatttctacaggaatagatagctctgggatttatttctattagggtaacccaaaaatatgctgaaggtttcattgtttttaatccttctccttaggaccctattctagaggggatttatttctttatctgaaacgaggggatgttagtgtgtgtatatgtgtgtgtgtttgcatcatttattattccttaagcaaaatatccaaggcactgctgcgaatgctaaaagtaggagaagtgatttgtgcatggctaattggcacaggagatagaagagagcaagtgcctcagaggaggaactggtacttttattgtgactattgaaaggaaggagagggctgtggattgctgttggagaatgaggagatttttggaagaagtgctgtttgagctgggctctcagggagcatcaatatttgcagacagcagtgttttgagaccatgtgtctgcaacagtcaggtgtagaggcagcagggtgtggttgggagttgaattgggatgccttgttgggtgtatgacatggggatgacaattggagatgaggctgaaaagatagaatacagtaggggagaaagaccttagaggggatgaaccttattctataattaggaggaggccttcagcggcttttgaggagagttgatgatgagaacagagcttagctgtaggagcttttgaggagagttgatgatgagaacagagcttagctgtaggaagaggattctagtggcagagtacagaggatctcagagctcctggacagtcactgtagtctgtaattcagcatgaaatcattgtagtttagtcaggagcaccaagagagccatgggtatttaatataaatacacaactcatatttcagtggttgctgaggcacagaggaactagattttgctttgggcagctgtacttgtcttgactaaagccagaaacctctgatgtattctagaccagaggttggaacatggtcatatagtaaatgttttagactttgtaggccatatggtttctatgatctgtgttacaactcctcactttgcccatggcagtgcccatgggtgaatgaaagcagctctagaggaatgaacgtggctgtgatccagtaaatctctatttacaaaaatggccaaccaggtttggccacttctgttctcaaccagtgcttctgaaactttaaggtgcatatgaatcacttgcagattctgccttggtcacatgcagattctgcctcaggagttctggggctctgcgtttccatcaagctcccaagagatgtggatgctgcttatctgcacattcgccctttgagcagcaaggcttagaacagagaagacagtcatttccttagaaaggtgtgtgctcccaaggtaacgacacagactctttaacagcaaaagcacagggctggctgatgttcttggtgacttcagttccatgctgtttgccttctgctctttcttacacacttttgcattatagtctaatctaatctgagagctttgttggctccaggtagtcctccccagaccagcttgagactggagaggtcctaatccctgaaaagatcatagtgccctctctctcccctcttcctatccccaatatgtacttcaaaataaaattaagactaagtaaaaaataggtaagaaagtctaacaaatctttggggtttttttttttttcatgacatttaggcttaaaaacaaataacattaaaattttctctcttgccctacatttccccaaccctcaccaaaaaaaaaaaaaaaaaaaaaaaaaaaatcacacacacaagaaaagaaatggagcttggtgtgccctcctgggtaaactggcctgggacctgctggtctaccatgcccaccccatctgccttgctggaacctgctgtatgctcaccctgcttgtatgtggagtgtttttattgtagaccagtaaaaccacctgctctgccccttgtggagttgggttgcaggccaaatgagatcgtggggtgatgaccctctgaaatggtaaggggtatatggatgtcagctgttccccgctccacccctcccaattgtttctctgcttgctgtagctgctggaaggcagccagcccaactatatggctcttggagatgtttgatggcattggactatggcactgagaaggaaaatggtcccaagatggacgtcaggaaatgagatgagaatgagcaagcttatagtatctttccattagttcaggtactggttgacaactgtgtttgaacaccaggttatttctgatagtccttttagaccacactgggaagcccagctattggcccatgtttcctgatttccatggtagattcttttatgttcttatatttctcgacattgccaagtcatacagctttcacattcttgactgcaacccctagtaaataatacattttctcttatgaccctgtacttacatatgtacgtgtagatacatacacacatataattaaaacacaagttttaggagacaacattgacttttaaatgtatgatggggccttttgcaatcttttgcacttttttgggaggggaagaatctagtcttgggcctcccaagtactctcagagtccactaggtcatgacctatggtcaaagaaagctgcccaggaagagtgctttgctattggaggcaaataagtaattagctaatgctttatctggttcctaaaaagatttaaagtggccgttcagtaataacgaactgaggtaatgaaagaggcacatttgatacagtgacaaaactgctgccttttgaacaattcttacaaactattaaatgtggattatgatataatgcacacaaatcactctctgtgtatctgttaatactttttgtgtcagaaatgtttaatgaatatttggagtttttctttttgttttttgtttttctgagacagagtctcactctgtcacccatgctggagtgcagtggtgcaatcttggctcactgcaacctctgcctcccaagttcaagccattctcttgcctcagcctccagagtagctgggattacaggtgcgtgccaccatgcccaactgatttttgtatttttagtagagacggggttttgccatgttgcccaggctggtctagaactcctgacctcaagtgagccacccgcctcagcctcccaaaatgctgggattacaggcgtgagctaccatgccggacctaaatatttgttgaattgaatagagcaaataaatgtgttctggtagagcacatgaacgtggaatatatgttctgttctataattctttgaatatattctgtaattcattgaattatagaatttacaggtttggaagggccttagaacattcatagtacagtcacctcgttttagaatcgtcttcgactgaggcctcctgcttcctactccaggatgctgcccttcaagctgggaggtttggcagatgtgactccagatcacaagaggtctcatgaacctaactactgtatctcaaagtacagggtgacttagctagtatgtggatatactcttaaataacattgaacccctagtcaaattttttctttttttctgagacaggggcttgctctgttgcccaggctggagtgcagtggcgcaatcacggctcactacagccttgacctcctgggctcaaatgattctcccacctcagcctcccaagtagctgggaccacaggtgtgcagcaccatacctggctatttttttttattcttttttgtagagacagggtcttaccatgttgcccatgttggtctggagctcctgggcttaaacaatatgtctgccttggcctcccaaagtgttgggattacaggcgtgaaccaccatgcccggccccaaataattttttaaaaaggttattcttttaaaattcctcttttacttcttcagattctgtcaaaaagaacgtctcattggttgctagtaactgtaacatttgcctaatcccttttaacagagagggcaggtccagagtcttaaattgggaactggatctggctaaaatttaatactgttttgatttggcatgatgattttttttttttttggtctatttatggcatgtgattgtgtttttccaactgtggttctgatataaatcttcttttgaagatgtattttatataaaaagtaaatattctttaaagggacatgttaaataacttataataaaagtgaaaagtagtaaggtaaagtcagcagaattggtacaggaatgcctgaaatgtataaaaccgtggccttaacaaagcccaattgcctttttagtgacttcggtttcaagatgagtgaagatttgtcattagaggtttgtgttccagatccggaattttctggaaagtcatactcccctcctgtgccttgccctgtgggttctacttacaggagaacgagagggtatgtatcacagaggttgccctgtcaggttctcagcggtccgcacatggagcgagagagcatagaggaccgtctggattgctctacactcgaaattctagaattccaagttaacagcctgcaagtagtttgggcaacattataaattatggtatttgtaaactctcctacctccacattgcaagtctgtaagcatccctgaaactctaggaatatcttaagtcatcaacttcagcagggaaacatcttcagaggaatgtattcaagagatatatttaaaaatcttggccaggacagtgccctaaattgtctgggcctgcctagtctaattataaggagaactgactcagaactacgaacatcctctttctagttctaaagagaaatgagtggatggactctactggccgtgggtagtaagtgtattcccagctgggatgcctttgtggctattcttccatgtttctgacctcttgctcttggggtggggtgacagctaccggaagatttctggggacacttgtagcggaggagatgttgaagcgcgactggaaggagagctggtcccctgtcccctggcaggtaagagaggtggtttcttccctttcatttcttgagacatggttgaagcagtatcacgatctcacccaagtccgggcttgtggctcctttaattgagtggagaaaaacaatggccgtcacaagcatcacagggcttcctcttttccctaaggttggtttccacactgaacttgtacatagccatacccgtttttaggaatggaaagtactttgtgtcagctcagtttctttgagggaaatccctttgttaattgaaaaatatttattcagcatccactggggtagaaagatccccacaggcttttgtgtgttccttaatctgtttgtcaaagttgagtataaagaggtgtgtgacttcttaggaagtagctaagtagtctatgttaattttataataaaactaactgtaactaaaattttaatggaattttatagatttcagtgtactttttatgtgttgccagtttaacccttttaacaactcagggaagcagatattatcaattttgttttttactttttcacgaggaagcatgttcagaggaggttaaatggcttaaggtcacacatctagtaagtgacaaagttgaaattcagactctaagccccatgctcttcattggacattgcccaaatggcaaataaatatcattctcactattttagataatcattatgcatgctaattaagaaaaacttctctgaaatgattcacatgctataaaggtatagtgtgttctaaaacacgtttctgctagatttagtggtgatgtaacatggggtctttaccacagagacatgaaattatgatactttgaaaaataatctcttagttgcttttcttcactctgtttccagttcttattcatttaaagcttctttattccctctgtgccctctttcctgcccattacctcttggtgaaggtaaatggctggagttaacttccgtctgtggtgggtggtggtgtcttacgtggacagccataagcaccgaatgaatcatgaaagaagtgtgtggtctccacaggcagggcagggcagccctctcttttgctcactgccgccagcttgccctggtgtttttcatgctaagttcgttagtcccttaatttaatctttcatcattaccagagtaattaacatacctcactatggaggcttgaaaagaaccaccacttcagcaaattccaacaaatgagcagataatattcaaatatttccctcacaagagctgttattgatgagggcgtgggttagtagggtttgagtgattgctcttgaggggctggagtgcctacttttgtaataaatatttctgaagataattcagcaagggacaaaacagtttgtttaaagccatctaaactggcaggaaagctattttctcttctactggaagatagaacagggaacgaagtggagaaatctcattccattgtgggccacctcctatgtaaaagagagaaaaaaaaaggcatggaataggaggcagggatataccaggaaagaaaaagatgctttcacaggactaatgggggccgtaatatctttgcaaagatgaggtaatctgggcatctggaaggattttttaaatgcaagaatttttcttcctttacaattactatgaaaacacacattccttggccaggaccagccaagaattccattccttttccaggttaagcattgcgcgctggaatgccgcatgctgctctgaacataatcctaaaacacgtatttctggattcaggttctactttatgggtattagtttcttagaggaaaaaaaagcccagagtgacagaatgaggtttatagatgctggagagagatgtggggcaaaagccttgctgctgcaaatgtagctttcatgtccctataccttagctggccccctccctgggaatgacagcgggaaggtttccttgacaaccaaaaggggaggtaggttaccatgtgatggtaacatagatacttctaaagtgacctggaaccaaaggaaaagaaggaaaacttaccttattaaaaattgtaggtagatttattttttgatgcattatctatattacagcttttataaagaaggtgagtggtacatgttaagtcactgagtgtatggaatcaggaagtgggcaggaatggctaacccaggcatgcagcaaaagaattccgatttgcatcttggtcccatatgcaacacactgtcaagatgcacactttagacacagatgctggtgtgctgcttgtgtccactcctggggaagaatctggatgtttcccaagccgttccctaagtggacaagacagtgtactgggtcttcctatttccagttgtctgacattaggtaagtatcttcagcactcaggaccttcatttctacatcttaaaaatcatccacggtagcgtctgtatcataacaggcagcacagtgtagtggttaaagcatagactctggatccagagtgcctgggttccaatcttggttctgccacttgctagttgtgtgaccttgggtgagttacttaacctctctggtctcagttttctcatttgtaaaatttggttaacaagagttctaccatcaggcagttgttgtgggtcttaaacaatacccgatacgtagtaagcacattatacacaatatgtacacaatttatatttgttgagtagaaacagaatttttgtggtgattatgttgtggaacattttgtaaatagccaagaacaaatgcattattagtattattttggagatctaagaggttcatagaattgccatatggtgttgtgaacaatatgaataagtgagcaaattgattagagagcttagttacaaagcttcagtgactaatggtctctcgtcaacaagatgatgatgctgtggtgatacagtcacgtgaggagggagaacagggcgattggtgtaattaggttggcaagtgtgacttgaagactggcaggcttagcccagaagtatggttgttgaagcatgcatattgggagatttagaataaagaaaaacataacaagtaaaacacttgcagatgaagaaacagattcactggagtttaagtaacttgcctgaggcagaaatgtgattccattacacacctcctgagtcttgatttctgtgctcttcacttggtccacaccacatgccaatgaatttgaggtttgtgtatgagaaacaaataggtcagatgtgctaggacctcttcagcatcccctgggtccaacctcccacgtgtcttgtgtgtctggcagaagagaacgagttcattctgtatgctgtgaggaaatccatctaccgctatgacctggcctcgggagccaccgagcagttgcctctcaccgggctacgggcagcagtggccctggactttgactatgagcacaactgtttgtattggtccgacctggccttggacgtcatccaggtgagtcagcgcttggtctgactgtgggagctgtgcatcgtgactgccctgtcctgataagctgcatgcagaatggcctatggaaatgggcagttagaagtttgtaagtgttactcatctcagggctgacaggtgaaagtttccagtcttctgtgttagtatttttctttctctgtcttcatctgttcatataggaaggataaagaaagccctaaatccacagacctgcttgaaagtgaggtcttgcttttcctgctgggaaggtgttgggactagtaatgtaggatgattagttgcccccctattgtgccaactgcctcttgagcatctttcttcccaagccatgatacagtaacacttgacttacccatagctcacataattatccacttcagctgttctgaacacaggtaagaaccaggaagtaagcattaaagagccctggacaggccaggtggatagccatacgctcacacccatgcatttaaaggagagctctttgatctttattcattgtctacttaatccttttagaaaagcaattccaacaaatttttatctagattccaacccaacagaaatttcacagtgcctgggtatttgaggggcttggggtgggggatggcggtgatgctgaatggagctgtccaacaatagcacttgatggctaagagcctcacagggaagaaagagtataaaagcagacacaagaactgaaatgtaacagcagtctggtttcacttattttaaaagcaaacagactcatacaatctcagtaatctctgactttattattgccatacagcataatttagtaaccagtgttcataatgataatgcagagtaatatatatgattaaattctctttattctgctttaaaaaacaaaaatgtagtatattttagaaatgctttcatgaaaacctggcttcatgtgtctggaaagtttactaacgtaaaacatctcatcccttgccagtcctgccagttgaataaagggttacccttcatgggactgacttggcagggggtcgtttgaacagttcctagcatttattattacttttctctcttaagcgcctctgtttgaatggaagcacagggcaagaggtgatcatcaattctggcctggagacagtagaagctttggcttttgaacccctcagccagctgctttactgggtagatgcaggcttcaaaaagattgaggtatgtgtattttcgtgctgttcttaattaagggagcaggcggggcacctgggctttgagccacatttgacacagaggcaagggccagtgtgtcagattactcaggaaatttactgcgagtttccagagaatggaccagctgagcctctggagaggagagaaaagggggtaagtacctgtgagttgatcttttggctagcagaagcttagctaataacaataaatggtaatatttttattttatttatatatgtacttacttattttatttatatattatttttgttttattttactacttttattaaacatgatggcaaaaactacaatcacttttgcatcagcctaatatcatggtattattataatgctataacaataatcgtctagtattattttattcgattagagtgatagcaacaatatcatcatcatcatcatcattgccactgttattaatccccatttctctgcaacttagctacctagtaacctgtcccaccttatatacccaaggcaaggatgatgagtgacctctaaactgccaaatctttgtctgggggaatgtagtgtgctcagctcactgcctcagcacctctttatactgactctgcatggagagacggcatgtgggtgaagtgggaagtgcagtagaagcagggagatgcagagggctaagaggagttgcaagacgaaagacacagactcgagagatagacccagatgtaggcttgactccactagctcagcgacatggggcaaggtgcttatgctttctaaacttcagttgcttcatgcgttagatggagattcatatattcgcacaaccatttgacaggggttctctgcatgatacatgtggtttaggttctgatgataaagcagtgggcaggacacacacgttcttgttccagtagagcttagattttagtggaggaagcaaaataataaatcagttctgttggtggtacatgctgcaaagactctgaagcagtgcagtgtgattgcgcttttggagagtggggcaacattagaataggcagacagagcaggcaacttgaggttgatgtcttagctgagccctggctgagaagaggatgatcttttgtccacctcctggggatgctgatagaagtgaactggcatctactgaatgctgcctcggtggttatgttattgctctttctctcctttctttaattgcgtgtggtcagcacttggctaggggctaaaagaatgcaggtgatgcacaagcacccaccttttcacaggctgtggggcgaccactgcacaactcaaatactgttggtgcaaaatggtgtcagatgagccaaggtgcagagctactgatgcttattggtccaggtgggtcagaagagttaggaaagtaggcaggcctggcagtgaggtttgaaggagagttatgccttgattagattaagcagtggggcaggtaggcccaggatgggatgtggcaagagcagacagcagtgagtccgcatcaggcttggagaagcaagagatgaccagcctggctgacgggaaggagcaagaatatgagtcccacctgtggactcttcattgcaaggctgtgacattgagaatttgttttatgggagtgtggagtcatcgattgccttggaacgtggagtgacacgggatggtgaaataagtaaatgctcatttgcttatttacttatttgagtaatttacttattgatactgctttgtccagatcatcatgccctggaaactggggcttacatggttctagctcctctttcagaccacttgaaaattgtcccatgagtcagaggaaggaacagcgcattgtgactagaagttggggcaggtttcgcagatgggtcaggtcagggaaataggcaggcatggagggggcatgtctgtagcagaagctgagtagccatctttggcaatgggggtctttaaggagctccgatccatctcagcctcttttccccctgtttttgtcaggtagctaatccagatggcgacttccgactcacaatcgtcaattcctctgtgcttgatcgtcccagggctctggtcctcgtgccccaagaggggtaagtgttgccccaaaaggaaatcagtcttgcgtccaatgctacactaatagattctcatggaaacacagactgcgggacaaaaactctgtttctcatgatggtggttgaaatggtctattaactgagaagtttgagaccacagcttagtcatcgtggtcaggtaactccgttcgctttttgttagccagtgtcagagtctctttaggcatccagatgtcttgcatctgtgggttgtttctctagaaaagttgatgttaaaagagagcttctgtagacatagacaggcctgcttggatattgtgagaactttctcttgagtttcatgcatggtacaaacatttaattcattccatctttcccctgccttcccagcatgtgtaggttttcttacgtacaatcagtgtgcacttggggaaggcaaaggtgctttttattaactcattaactgaaggaaacataattaagagggaaattctggatttgacattctggcttttcctctctcgtagcatttatgatagagaattggcacaatttttttcaaggaaaattctaagagtaatgtatgtacttggttgacaatatttagagagaacagcactttatgaaaaaaatttgcattcttccttttcattcttaaccctttaccctcacacttcctagtggtaatcattgttaataatgtcttgtgtatctttcatgattgcttttacttatgtacaagtattatctttaaaacacacacatatacacacacatgcacgccaaataggattgtagtgtagttactattctgtacctttttaaacaaacttaatatgtattgaaaatagttctgtgtgagcatatatagatttttaggtttcacagtattctattatatgtaccataatgtgtcacttcctctgctgattaacatttagtttaatatacatacatatacatttctttgtatattatctttgcataatttgattttatctatagataaattctagtaaaggaatttccaggtgaaggaatttaagtagtttcaggtgttgtcattacatattgttataataatgctgaaataaccagccggatcattcgaaaggagtttctgaccttttctggagtagtatttgagctcccatttctctagtattgatgaggtatgtgttctgtccccattttcgctagggtgatgttctggacagactggggagacctgaagcctgggatttatcggagcaatatggatggttctgctgcctatcacctggtgtctgaggatgtgaagtggcccaatggcatctctgtggacgaccagtggatttactggacggatgcctacctggagtgcatagagcggatcacgttcagtggccagcagcgctctgtcattctggacaacctcccgcacccctatgccattgctgtctttaaggtgagtccatttgttgctgccggacagtctgctagagcgggtgaggagcatatgagatcaggagcctgcatccctgggctttgcagagaagctgtttaacttcttaaaggttgccttttttccaaatttgagataacttattttcagcctatggagggatgccaggcagaggcgccaagggtccaggctcccctgctgttcacatttcaaaaggttaaaagtgaaggctcttcccatgaacattcccagtttgcccctcagtgtcagtagcctcatttcagggtggtgtcttcattttttgtgcgctttgctcactttattctctgatgacttccggtgagctctgcaccacctatagtgccttgcagttctttttcgactctggagagcaacatggctcttcccaactctgggaaacagatttcaaactgagggggttgggtttgtgtcataaacttgaatgcttatcagatagtttcttttgggcagtttcttctgtggggttatatggtgaggtttggataaaattgctgtcctttgcatttaagtagaatcttgatcaggctagtcattcagccaataaatgttagttgtctcctgcctgggggaactcttacccttagagagaaccagaataaagaacgaaagagctggactaatgggcaaaggttttctttttagaatgaaatctactgggatgactggtcacagctcagcatattccgagcttccaaatacagtgggtcccagatggagattctggcaaaccagctcacggggctcatggacatgaagattttctacaaggggaagaacactggtaagccagagtctcttcttttgtctctgtagagttgatctcaagaaaggggctgcgtgtggccaatctctgctcagagtaggagctggcagcctgcatctttgttgtcacgacaacatgcacattatttaatttcttcctaatgacatcttaatttcttttctaatgatacacaaacagctggaagacagcatgcttttgcctgcctagagtgttggtgcttggtgggtaattacaccctcctcctgcccttggcccctgactgattggtggcgcggcttctgttgcagctgggagagtcctaacatgtgcttaatccctgtttggcatgcttgcaggaagagactctgtgctgggtgctcagatagttgttgcttcctgacagggcctcttgcttgttctctggttgcccagatgacctattgctcattgaccgtacctacctctgctggaatggcactgtgtagttaggtgttgttttaattaacttttcccaccatgaaaccctaaaccccatgaagaaagagatggtcttttttattccccgatagttttaccagtgtctagcactttgtaggtgctcaattcatatttgttgaaagaataagggatgaaaagggaggggaagaattgcagtgggtgcagacagtagctgtcttagagatctactgggtgaggcttcaagaactgctatgaggctttgacctgctagtcctggagtctgagactattcagtggaaagcctttatcatttcatgactgctctttgattttgcttatctcccagccatactattgattctagaggagaaagatcagaggattaccaggaagaatagtccctttaagaatttccctctttatctcagcaggattaaatggcatcctgggtttgctgattctcctttattgacaaactgctaagttttctgttcttaactggaatgttgatattgttttatggttcttggctgaccctatactaggagaaaattgacaggggaaataatactgttatagatatcattgttatcctcttgggattgtgaagatagcatgagaacaccctgggaaaactataaagtgtcttacaaatgtaagacgatattatttgttatgtcttcaccactgacctgtgaggtagggaaggctggtattatgatccatggtttatagattagggaattaaatctcagatatgaattagctttcccaaaatatcctcactagtttaggggctggccttttgttgcaattctgccgctaaatggagaagtcacattctttcttagaggaggcacctgttttagaatcaggagagttgaaggaatcttgcttctcagctccagtgactgaaatcttcagacctttgtttaatggaggacatccacccctactgatctgacttgctagctagcagagtggatttttagtatttctccaagtggatttttagcatttctccatgttaccacttagtccagaagagtgggtcttcatttttacaagtgcttgtatgcatgtgcttgtttgatttgcacacaggagcttctgaaacactgtgtgcagatgaagccagtggctacccggtcacaacttacttcccagtcttgactgtccacttcatcccaagaacttgggcacagctgacatgcagtcacacctgtgactgaggagcagtgcgggaggagagagtttgtggtctcagcacatgcaaacgtggtgtcttggtgccagtcagacaggtctgcaatcctcaccttaggtgtagtttccctttcatgcctcaaagagtcatcttcatttaagttagccagagtcattttggggcccagagtgaggtctggatagatgacaggctggtttaaaagggagatatgtattagcagggcatagtggcacatgcctgtagtctcagctcctcaggaggcggaggtgggagcatcacctgagctcgggaggttgaggctgcagttagccaaggtcgtgctgctgcactccatcctgggtgacagagtgagaccctgtcaccgaaaaaaaaaaaaaaaaaggctgggggagatctgtgttggtgagtagaacacagacctggacctgtgcatgggcggctgtgactgtccctttggccatggccagttgtcgcctctctgctcctttctgtttgcctttgggattttctcttgctgtcctttggttgtgagcaggatacttccaggagacctactgcctccaaacacagggctggagaaagacgtttttgtctttctctgcagcccagtttgggtcaaatcaaagcttttgcagtggtgtctggctgtcagcactgtctatgagcactccgcacctcttggccttgaacttgtttgctctaacctgcttgctttttttggacactgataggacacttgcttttttggacattgtattacagatccacggtgtgtgttggatctagcacttggagaaatgctaaaaatccactctgctagctagcaagtcagatcagtaggggtggatgtcctccatcaagcaagggcctgaatatttcagtcactggagctgagaagcaagattccttcaactctccttattttaaaacaggtgactcctctaagaaagaatgtgactcctgtccatctttattatttttgttgtctcctcctaacacattcgggactttctacagtagtctcctgcttatttgccattttgctttctgtgatttcagctacctgcggtcaaccactgtccaaaaatatatatggaagattccagaaataaacaatgtataagatttaaattgcttgctgttctgaatagtgtgatgaaatcttgtactgtctcctccctgtcccacctgggatgtgaatcctccctttgtccagcgtctcatgctgttgatgctgccggctcattagtccctttaggagccggctgggttatcagggtgtcaaagtactgcagttcttgtacgcaaggaacccttattttacttcatgatgaccctacacctcaagagtagtgattccagtaatttggatatgccaaagggaggttgtaaagtgcttcctttagggaaagggtgaaagttctagacttaataagggaggaaaaaaaatcttacaccgagtttgctaagatctgctgtaagaacgaaccttctatctctgaaattgtaaagaaagaaaaagaaattcatgcacagtataggtttggtcctatctgcagtttcaggtgtcagctaggggtcttggaattgggggttttggaataagaggggactactatattaaccaagtgttaaataataataattgatagtaactacatgtattgaggggttgctgtgttataagtaccacagtaatgtgctttgtgggcttgtataacctcacttcgtcttcccaaagacttctatatgtactatcaatatttccattttataggtgagaatatgaaagtctggtttagtaacttgtgtaggtcacacttttagtaagtggtaagaatttgcactgtggcccgttgacttcaaagcctgaacttcgataaaaccacccggctctgctccctctgtcatgtgttgctagaatagcagtgccctggtagtatgacagcagttcagaagtactgttctagattttgattgatgatggttcataataaaaatgttgttcagttgcaacatttatcaatttgaaatatttggtcctttatagctagctggtttttattttttatttgtttagttttttggagacagagtctcgttctgttaccccggctggagtgcagtgatgtgatcttggctcactgcaacctctgcctcctgggttcaagcaattctcatgcctcagcctcctaagtagctgggactaaaggcatgtgccaccatgcctggctaattttttgtattttagtagagattgggtttcaccatgttgcccaggctggtcttgaactcctgagctcaggcaatctgcacgccccggcctcccaaagtgctaggatttacaggtgtgagccactgtgtctggccactagctggtttttaaatggtataactggaatttattctttgtaaagtgtgttttttctttaaagaggttactttacaagattgttgatgtattcagttgctcctgcgatggctcttggagctttggaattcttttgcagttttggaattctcctttagagcctgcagtaagtatgtgcttttaagtatctataatgagggcacatatttattatttgaggtagatttgattttgataattgccaagtgtatagatacttgagatgatgacatttttggctcctaaagtattcctggaggaattttccaaacaggaaatgtgaaaatgttctgaacatgcccagtgaagacatcacggggctatgtgtttgatcttctaagggaatgtctttgaagatgattgtccactcttcacattgagataacggttttcatattgcctggtccactcaagacaattgtcatcctgtataaagggtctgtggctgtggtagaactgccatcataggagttggtgaattacccttccatcttcttccagcttctctctgatgcagctctcccattttccattctctggcttcagactagcctagacattcctgcccctgcctacctcttaggatcagtgacttggttagcttgttttgcagtttgcccctggttactgcctcagagtacagtttcatacatttctgcctagatcagcctcctgaaatatgataccccattttgagttctctactcttagctcttcttgcttgtttggataggaatatttgctctgcatatgaaaaggttagtgaaatgattttacagacatgatccctgtgaaaaaaatcatcctgtaatagagtagttttttttatttgttcgttttgtttgtttgtttgtttttgagacaggctctggctctgttacccaggctggagtgcagtggcgccatctcagctaactgcagcctctgtctcctgggcttaagcaatcttcccacttcagcctctgaagtggctgggatcacagatgtgtacccggctaattttgcttattttttttttgtggaggcggtcttcactatgttgctcagggtggtctcgaactcctgggctcgagtgatcctcccacctcggcctcccaaactgctgggattacagatgtgagccactgcacccagccggtaatagagtattttaaaataacatcatattccattattgttcaggatcttggaacattgagtgatatattgttctttgaatacaaaacacatgttcccacatccttgtttgagttgtttctcatgagtggtggctctatgtcaattctgcattccctcttgtagccagtggcctgtacctttgaactaaaggagccatctgtgcccactaatggatcagagtgaagggatgtctgggacttctgctctagtcagctggttagtctgctatggtaattaagctgttatgattgattatttactgaaccttttggactgtttcatcatgtggacttcccttcctctggaggtgtatgttttctctctatttactgaatcttttggaatgtttcatcatatgaacctcccttcctctggatgtgtgtgttttctctttggtaatacctcttactcttttccttggcatcataataacgttgttgccatagcattgtgatttttatttttatttgtaatgtaaattaaccaatgatgtgcccacacacccaaagctactgcgtatattatccatatcgacactgattatcattcatgaacttcgtctaacctgtaggccaggataggcatggcttagatgaatgcttggctgggtggcaacagatgatttggatatggtgctgaagtgtgggagggcatctctgtccatgacatagcacgaatgaagaattagcaattgagttttatctaagtttttatgttcatttttcccattttcatgattaataattgcagtcaaaagaaaaaacatgatttcatagtttctgtgaccccatagttgtatcatgtttcagattgttataaaatggtttatgcatcttcttacctgccatccccggaacgatgtaggggataggatggcacttttgccatcctcgttcatccacaaaggctccttctcaagagtgcagtggtggattttacgaactctctccggtgctgcctttagtaagctgaaccagagaaaagattggcaggagtgggctagatcagcatgaactagtccttacctgaacacattgcacagcagtggctgatgagtactgtggttggctcctcctttagctcttgaggggcactctggcacaaaggaattgagaaggggaggcctggatttttgtcctgggcccaccattaaccaggtgtatgttctaattaaggcctttggggccctaaggagcagaaacccactcaagctagctcaagtgaatggttttatggaatgaataaaggagcccaaagatgaaagtctaggagagcctcatggggactggagctgttctttctctttccctctcattaggcctcttctctctgtaagcctctttctttttaaaaaaaaaattattcggaattttgaaggcaatgttcaactatattatagccactagtgttgtaattgagaagtccaaagacattctggttcttttttaaattaaaaaaaaaaattttttttaagggataggatcttgctatattgcccaggctggattcgagctaccaggctcaagtgatcctcctgcctcagcctcctgagtagctggggctacaggtgcgtgctgccatgcctggcctccttaagtctcttttagtctcctgacggtctgcagactgagcttatctgcatacccagagttttgacttccacacggttttggcttgccatgtgccacttcaacacccatgctctgtgaccctttccctggctccagctccttggttgctttcttgtctttcagtgacccaattacaaattcccaggaggaaccctgctgcctggcttggctctggggcagtctgatctggctgaagacaggatgcaagtcactggttatactgagcagaagttttcagcacagtaggcgccccaaagcttgccacttgacccttgagagcttctcgctgtcctttccgtaagacgaggaggttgcagtgggtctccttcttgtattcagtacctccctcatggtgtgtattaacctacctgctgctgtttgtcttccctccaggaagcaatgcctgtgtgcccaggccatgcagcctgctgtgcctgcccaaggccaacaacagtagaagctgcaggtgtccagaggatgtgtccagcagtgtgcttccatcaggggacctgatgtgtgactgccctcagggctatcagctcaagaacaatacctgtgtcaaagaaggtacttccctttttcttttttgcctgtcatcctccttcctttgtttcctgctccccgccaggggagggagggatagctctctgtttcctaaccttttcgtgttattggaaaaagtccaaggtaaaaatcaaacctaccagatactcataagaatactggtttgggttctaagtcctggtaagggtcaaagaggcccttcagtcctcactcagaacaggcctatgctgtacctttctaagtagtagctgtggtttttggtttcatgtcagatggcacaggctttcttcagggtctccctttttattcttttgcttcttcctctcctcacccatccctcacatccaggtttcttacctgctcctgttttgcataagttggaccaacctgattgggaaaaataaccagtgtgactccttccgcgtttactctcacctaacggttgtccatcctctcaccgtagcctagcccagtgtgtcctgaactttcagaccaatgtttgcaaagcactttgagtctagaccttatgccatgaccaagcagcaagagcagccttacacccactccccctctgaatttgaatatagagatttaacatttctttcctccgaaatttaaaaagtttttccttcctgtgtaatttttactgtcaccacttcccccgcctccagcatcacgtttctgtgagtgaggtgaacccctgcaagggcaccttgccatgaagtgcatggattgatggccagaatttctgcttttccttatctgtgattctatttgcctttttttttatatatattttaaagagacaagaaagagacagggtcttgctgtattgcccaggctggcacattcacggctcactgcagcttcaactcaaactcctgggctcaagggatcctcctgtctcagcttcccatgaagctaggactacaggcacgagcccagctaatttcttttatagggacgaggtctcactttgttgcccagtctggtcttgaacatctgggctcaagggatcctccctcctctgcctcccaaggagctgggatcacaggcatgagccactgtgcctactctatttgctttgtaatcctaaccctgcttctcacagcggcccaagtccaaggcagtgaaacacacaatacaagccttttagtcaatcttccttaagaaatataaacagaaaaaagatgagcctttctttcttagaaacaagagactttctttcaggctatggatacaatcttaaaactgtttggaaagaaatagaatcaacactaaattccaagagaaggggaagaaagctactccatatttcccattagaatgcctttgattatccaaatatgagaccaatcatcgcatgtccttgatgcagtttgccaaactatacattttttttctgtaaggaattttaattgcttgctttaaagtagtcatggggcagaaaaatttctcagagtattgagaaaatcttcataactcatttgcttgatagatagaatatatatggatatatataactatgtatataaaaacatacctatagatatattgaatctgtatgttttaattctgtgtagacacagtccattaaggagttctgtgtgtaattagtattttataatgttgatgtactgtattcactacccaatagactcaactggtattgtggttatccttcttaaagcattgtatctgcttctaaatatttcttccagcctcctcctctcttttgattttaactaaaagaggaaagcaagaggctagtatgggacatttccttccctgtagacacgtgtgcttggcattcctcctccccctttaccatcatgttacttgttgtgggaagtccgggaccccgaacggagggaccagctgaagccatggcagaagaacgtggattgtgaagattttatggacatttattagttccccaaattaatacttttataatttcttatgcctgtctttactgcagtctctgaacataaattgtgaagatttcacggacacttatcacttccccaatcaatacccttgtgatttcctatgcctgtctttactttaatctcttaatcccgtcatcttcgtaagctgaggaggatgtatgtcgcctcaggaccctgtgatgattgcattaactgcacaaattgtagagcatgtgtgtttgaacaatatgaaatctgggcaccttgaaaaaagaacaggataacagcaatgttcagggaacaagacagataaccttaaactctgactgccggtgagccgggcggaacagagccacatttctcttctttcaaaaggaaatgggagaaatatcgctgaattctttttcccagcaaggaacatccctgagaaagagaatgcgtccctgagggtaggcttctaaaatggccgcttcgaggggcggccatcttttatggtcgaagctgtagggatgaaataaaccccagtctcctgtagtgctcctaggcttattaggatgaggaaattcctgcctaataaattttggtcagactggttgtctgctctcaaactctgtctcctgataagatgttatcagtgacaatgcgtgcccaaaacttcattagcaattttaatttcgccccgtcctgtggtcctgtgatcttgccctgcctccatttgccttgtgatattctattaccttgtgaagcacatgatctctgtgacccacaccttattcgtacactccctccccttttgaaatcactaataaaaacttggtggttttacggctcagggggcatcacggaacctgccgacatgtgatgtctccccagacacccagctttaaaatttctctctttttttacgctgtccctttatttctcagaccggccgacacttagggaaaatagaaaagaacctatgtgaaatatcgggggtgaatttcacccgatatctggctgaatttcccccgatagttactaaagggagggaaactcaaaagagaaagacctgtggtccagcagtaagaataatattggtttcatttcctcccctgccgcactctgatgggtagagaacacctgtcttcgcaaccagtatcgctgcagcaacgggaactgtatcaacagcatttggtggtgtgactttgacaacgactgtggagacatgagcgatgagagaaactgccgtgagtcttctggattggacgttaagcacttaccattactcagaagcctggttggctcttcccaggctgagggcctaaggtctagggcgagggccacccatgattggtgatgcccatctaagttgatggggcttagatgacagagaaaacatatttccatacacaggtagatattagatatataggattaatattatatacataatatttttttaaccaccccagaagtaccactcgttacaagagatttataaataaacgtcacatggctgaaactgaattgatttggcaatctgggctctaatcttggctgtggctctgtaataaagctggtgacttggggcgagtaaacaggtgatattctttgatttggaaattcaatattcagcctttttagggatgggaaatgagtatttactccagttggttgatgttggctacctaccaggctcaagagagattgttttcattggttagtaatgcatagcttggcctacagtgtggggccattggtgtacatgccatgtaagtgtcatctttaggctgtataatttttaagatctgacttctaaagtataagactgtggttagcagaagttaaaaccaaacaaccacaaataacagatagtttattaaccatgaattttcactatcttttcttcacttaatttttaatagcttcgacattatcttataaggagatgatttgcccttttgtcagtcatgcactcactcaacaagcagttgctatacaccctgtgttccaggctctgtgctgggcctgcatatatattgccgatcaaggcagaaacggagttcacagtctgaagtaggagtcagaaaaataggcagttacagtagagtgacgggcactgcgatgcggaagtgtcatatgcatgtaggatgggcacccaaagcaaacttgggcaggccctagcaaagagctctggagagtgtctggggtgaaccaagcagaggtggagggaatcaattcacaggcaagggagcagcatgtggggaagctggcatggccaggaaactggtttgagttatggagaatgggcatgggcacaggggccaaggtgaagttagatgagtgggcagcgcccaggacagcaagggctttgtggactttatcggagaagcagttgggaaccactgatgtcatgtgatgaaagttcatctttggaaggataagtagtgggcagaatgcgtttgatggagagagaccagaagcaggaaccaagtcagaggcttctcttttatatattttacctttggcaacccaggggctcatttacccatttgtactgtaagaacagattaatgggaagctctagatactcatttagccagtcatccgtggggcctgtgcccggctcccctgccacttcacccagaaagcaacttgtgaaatatccagctcattaaacacatctgggccctgcaatcctatagactcccccttttggctgatagagggttatttacaaagcctttccttaatcgttttcccttggattcagagggtgcctttcacaccgagggagtagagcttatttgctgaatggcagatttgggaaagcactagcctctctgtgtcttttctgcaaaaaataaggcctataaagcctcctttatcagagttgcaggaaggtgtgatatttgtgggggaatagccaaagctctttaaaaacattaatgcttattaacagcattgaagcagataatggaaaggagtttattacatatctgggtgggatagaagatgcttcttagaattaacaagttacaaggaaattgcccagacataattaggcacagtggaagcagggagatacaaaccagatgacctcatatccaagagtgagggacacaggtggcagagcattcctccttgtgcccttgggcttggtttctactaaatggacaagctgaatcttgtattggctccgagttttgagaggaatgaagacctgcatcttttgggaggcacctgctgcctccaatggcttcctcccacccagcccctgagctctgttgcagactgcacagttgtgcatgaaggatggagctggccctgccctcctcccagcttggcgtgaatgtcagctgggattcactttccagagaccccgagacctactttctgctccgtcgtctccctgtttcacctggctcaggtctacacatgtcagatggagctgaggcgtggagaggaggaaccagaaggatttaaaactcagagactgggagtcaagagagaggggcttatctgtgcctgcatgtgtgtctccctcatcaaggaggttgcgtgtggaggagagaggttccctgtttctaagcagggctgcaggagctggaccgcagtgactgagtactgccatgtggggagttaagtgaggcaccctgccagctgccagggagcagtggaggaggggggacaccgggatgcaggagggtgttgtcagtgggtttccctccctcttacacagattcctctagctgggtgactgtcaggcactcagggttttgacgcgaatccctgcagtcttgtcattttgcattcatcccctgcctcccaccacgagctcaattacagagaagaaatggagcctcaaataagagctgccaggatgtctaacggcagcattgctatttggcatttcgtgcacgacaacccctcccccgtgccagcattctgttctgccacattttacctcctgggtcagcctttcactctcctgagagcagcctgccttcccctcgcctttcctggagggtgtttcacggggtgccagggattgtgcttaagcacaggaaatatctacttaggagaggaagaaaaatctaattctgtatccattctaatgccagaaggacatgaggaatgatgaggaagagaagtgacatttgtttagagcccattatatttacatcctatttaataggctctggttccaaacttgttccctggtttatcttcataataatgctaccaagtaaaggcaggttaagtaagttgtaggttgcagactcaattcaaatctagtctttctggctgggcgtggtggctcatgcctgtaatcctagcactttgggaggctgaggcaggcagatcacttgaggccaggagttcaagaccatcctggccaacatggcaaaaccccatctgtactaaaaatacaaaaattaactggggctggtggtgggtgcctgtaatcccagctactcaggaggctgaggctggagaaatcgcttgaacctgggaggcggaggttgcagtgagccgagattgcgccactgcactccagcctgggcaacagagcgagactccatctcaaaaaacagaaaaacaaatctagtctctctgactgtgatctcaagcactaggacacattatcttacccagttttactgttgagaaaacagccgtagggagattaaaattaatttccccaggaagaggtagagccacgatttggtacccagtcttgactgactgcagacagagcctatgttcctactgtagaattctacctccatgctgcctttaccatctgtacaatgaagtgctaacttcttgtgtgaaattgagcttctctaatcgtagtttcatagataaaggtatttctgtcacttatttaggaagacacttttcgcgtctgaagggatcttaggaggtcacctagcctgtcactctctctcgccaacagatgacagtttctcacttttccccgtcctgttccgatctggaagctgtccacagaaagatatgcccttatctctcttggttgtaaatttcaagctctcatgtaatttatgtcttctgtaagtctaggtttaatttctgttgctacaattaatacctgctttcttctattttttaattggttttccagtaggatgtttacatttgtgggaaatcaattgtacctaaggaatatgttgtctttctatcccattttagctaccaccatctgtgacctggacacccagtttcgttgccaggagtctgggacttgtatcccactgtcctataaatgtgaccttgaggatgactgtggagacaacagtgatgaaagtcattgtggtaaggggacatcacatcctgaaaccctgctctggagaggggggtcattgtgctccctcacagggctgtactggtatgtactggttttctgatagccgtctcaggatttatgatattctagctgaatggctttctccatccacatggtggggttgagtcatttctctgtccattcttaaagagtttgtttgctgcttttcacgaggattcagttcgctggagacacttgcgaactgggaccctagattcccattaactctggatgggaccctagattcccattaactctggatcaagtgtctccagcagaactgaatcctcatgattcatggtcagaaaagatggagcctggactcagctcctgtcacttactcttagattagcctttgttttctagtctgaaaaatggggaaatggaccctgctttgccttggagagatgctataaggatgaaaggtgatggtaaggaagtaaatttctgaatgaattcagggggttattaacagctctacaggcttggcccacatgtctcagtgggtgtgagattagcctgctgaagacacaaatctgcacctctgtgaactgttcttttttttttaaccaatttaattcattcaactctgttattattagaagttagcagatggtataggcattgagtgagcatctgttttctgaatggacatttttatatttagaaaaacagtgggttacaattccaaggaatgatagagattctctggtccaatccttttaatttctactttctaaagtgactgaggtctgtagaggtcagggggcttattcaaggtgacacaattagtttgtgtcagaatggggaactggaatccatgtctcccattttctaatcctccactatttctgttgcacagtacctccttgtcagtttcatgagacccatcttagttaacagtccctggtcccagactcatagttgctgacctccgaaggagacattatgcaatcagcatggtgtgccagattgaggcatgagagggaagtgagagtggaggtcagacgctgacccagacgtggtgatgagttggcggggccctactgtgccctctctccctgtccacggggggcaggtccagccacgctgtgcttacgcacatggacacagcctgcttgattatgagcaggtggtttgactcacagcagctgaaataaggggagcaagggcagcttgtaaatcatctcaatgcaagttaaccagcagagcagagcctaggccatttccacacagaaaatacccctagcctggctcttggaaggtttttaaaaaattcccagttttccttcttcaagtgcctgaaaacatgtccttggaatgtgcaactatttccccttcatccctgccatttccttcccagcactcttagaaggttgaaatgtgtagctagttttgccctagtaagaaggaaacttcacgtggttccctctttctggtatcattgagctcacgtactgggtacatgtttgactgtgaagcagtttcagccccctgatcctctgttcatggctcattcttactagtttgtcctgaattcatcccagggtcccggttagccccttcctctgatgcaggtcctcttcgtaagtttccacactcttcctcaaaaatatctgatttactagctttgccatcaacaagcctcttggcgagaatgactgagacggctgccttgggccccacgcttggctgctcctgttttctgacgctctgtaaactccatgtgaaagttctatgccacagtctatttgggctgtgataacaaaatacttagtgtaggtaatttataaacaatagtattttgtttctcacagtactggagactgggaggtccaagactgaggtgccagcagacttattgtctagtgagggcctgttcctcatagatggtaccttcactgcagcgtcagatggcacctctgcttctggaaggactgcagggaaatgcttctatctgtacgcaagcgtggcagaaggagtgaacagctccctcccacctctttcttaaggacactaatcctattcatgagggctctgcccccatgacttaattacctcacaggggtcccatctcttaataatatcacattggtgattaagtttcaacatacaaatttgaagtttcaacatatgaagtataaacatttgaattttcctagcctccagaaccgagagaaataaattgctattgtttataagctcagcctatagcattctgtcttcatgatctccccaggagctttgaaggctattgccagggcagcctccttccccttcttggtcaagctctgctggttggttcttaccaggcccccacccttctagagacagcgcatccacccgtgtccctggagctctgcccacagaaagtcccgagttatgtttcctccgttttgggagctcagcactgattttactctctctgactgagcatctcacggtgatcagctcatgcagacctctcggcactccttttctcaaaccacaggctgtgtctgtaggagtcctctgtttcttgaaagttctacttcctggcctcctctatcactgcttcctaaccttcttcccatcatagcaagcatagaaaataatatatgtggagagcactgggatgaatggacaaggatgctgttgtcaagaggcaagcagctctaagggtctgagggtctcagaatctcagcccacctgtaacccatttgcagcacactgactggaagctgttaaatgaccttttgtccctggtaaaagtctcttcgttcatggtctctgtggatcattggtgatcacgggtccatctccatcctttatgagagctttgacaccagagacaaaattctgaacaagcttttgtcctcacctctctgtttatggtctcacctgcagaaatgcaccagtgccggagtgacgagtacaactgcagttccggcatgtgcatccgctcctcctgggtatgtgacggggacaacgactgcagggactggtctgatgaagccaactgtaccggtcagtacttcctggactcagttgacagcactcatccgttcatgcagtggttaacattatagctttaaacgatcggaaaatctaggctctgagaattagcttggaccttagaaatcagcgagtttcatgcttctcaaagagctggtctttgatgagataaggaacctgtgccagaatgtaaatcaacaccctgctttcaactgattaaacagtgttctgagtgatatcgttgatttatgttctggctcaagcttcttattcattcaggaccagtgttaaacagttttcagaccagcccctcggctggggtccatactttgagtaagcactgaactagctcatgttttttaaaatggagcatcagggggttccccagacaaggaaaatgtaaactgtgtttgtacccgttttgggtaagattttattaaaagtaaagatggaaacaacatgaatgtgctaggtgctataaggtaggggtagtgttctcattcttttgttgggttcgcttatgttcattacattatttttatgaatgagtggatgaatggtggccagatatattatgatggggcagggcagactgggggtgataggcagtgggtagtgcaaggagttgagaagcttgtggagaaatgaaaacaaattccattttataatcatcactttgtaccccattgtaatttgtccaaaaaacaaaaattaaggaatttttgttccagattttattactcattgagtaaatttgctctacagcctccttgagaagctgttattcagttctgtcttgaacccctctagtgattttggactagggagataaagatgtttcctttaaacatttcatggtaaggacagatctgtttttacactcggataattcagacttcattgtgtaattcattgttgagtcatcttctcaattatctgaagccagctattaatcttgtgaattattggacttttaaatctcatgtcttaacctcctctgcccccagagtatcccagcacttcctacactgcccggcatctggcggctcaaagcacgcctactaattggtaaaaggaaatacaaagaaggtacatctgttatatctcagacctaaggataaataactgtgcattatgctctggcttagacttgcttccccacggagagagatgacctcttcttttactcttttgtattctctgcagtgtccagcacataatagagtatgtgctcagagaacctttgtggattgagtaattttatgcaactgcttccctccattccttttagtttggaggtgacctcatatggccttaagggagtgaatagatctcttcaaatgccatatacatcacatgggatattctgtggtgttaccaaatcctgttcgcttgtaaagtccacccatgttctttctggcgcagcctctgtgtctgcacctctgcttctgaaaagactgcaggaaaatgcttctctctgtatattaaagcatggtctgcagaaggaggaagaaccgaggcccataaaggagctgccgttggcacaggaaacacgtgaatgctgtttggaagctttgggtttggatggatacttagttaatagattagaagggtgcacttggacattgcagtttgtaaattgcagtatgattgaacatcttgttaacacaactgccttactcaaatttgcatttcagcagcatgtgccggtcttacagaatgaattgattacttcatttctataggcaagcttgtataaactcctggttttttctctgattttcttccggcaaggcaaactggagaaaacttaagagtccttgctgctcagctgcagccttgttccaagggctgttcttccaaacctttcaaggatgatccaccttctctgtcatctcaaaatagttggaggtcagatgtgagctcatggtgatgtgtggcatgacacctcattttcagacctactaaattaagctgcgtacagtgccaaaagaaataggtcaaggtagctgacctcctgttggcatcagcttggatgcgcactctgctgtgcgtcctctttgcttttcttttcgccacttttactttccacgaggctgtttctttattcacctcaacccaccgctattgtttttaaacgtgtacatctgatttctgtgtgtttttttaggacaattacctgtagacattttatttgtattcttaacatctttcctctctcctagatatatggggactttagaatttgatccaaatctctgcctacagttccagtactaaaatacctagtattttaaacactaaatatttagtattttagttttatattaaaaaatcctaaacttcactgttactctttttaaataaccacacttctgcataggcacacaggtattaccaactacctctgtgtcttgttgctaatgcctcccaccaatgtacatccttcaggggttttgcagcaggagtctatgagtggcaaactctttcaaggttttgttattatagacatatatttaatcctcaatcttgaattcaaatgggtctgggtttctaggcttttagtaattttccgtattttcatagaattcttccatttcttcctggcctcttttgtgttgatttgaattctgctcttagttgtctgttcaaataataacagacactcttttctttctaattacctttaggttatattgctcttagttttacctacctaggtgtggaattatttttacttatcctgcttgagactttgtttgttttaagatctgagaatttttcgaaagacaactctgggaagttacagctactaactcttcaactatacctgttggctactttctctggtcttgtcttcagcagttactctaagccattcgttggactgcctcattctgttgttctcttccctcctgtttttatatttgctgtctctttatgactctgtgctagaatctgagcgacttctctagatttatcttccagttcaacaattctcttttcagctaactctaatctgctgtttcacatatacatggagctgttttttttatttccatgagtatacgttttgtatctagaatttctgtttggttctttttcaaatctgccttttatttttcagtgttctttttttaatactttatgttttttcttctctgtcattaatcattcaaattgtgatgatagtcatttttttcctcatgcacttacttttttttttttttttttgagacagggttttgtcttgtctcccaggctggagggtagtggcgcgatgacagctcactgtagccttgacctcctgggctcaatccatcttcccgccttagcctcttgagtagctggggctacagacatgtgccatcatgcctggctaatttttgtatgttttgtagagatggggttttgccatattgcccaggctggtctcgaactcctgggtgcaagtgatcctcttaccttgtcctctcaaagtgctgggattacaggtatgagctactgcacctggtccccttctcatacacttttttttttttttttgagacggggtctctgtcgcccaggctagagtacagtggtgcgatcttggcttactgcatcctctgtctcccaggttcaagcaattctcctgcctcagcctcacgagtagctgggactacagatgtgtgccagcaggcctggctagttttgtgtttttagtagagatgagtttttaccatgttggccaagcttgtctctaactcctgatctcaaagtgatccaccctcctcggcctcccaaagtgctgggattacaggtatgagctaccacgcctcatgcgtttctttatagtctagcgctttgtaagaaataaggcagtactttccctgttatactacttatttcatccattctactctgctcatgtttggttaatgcttttaatcaggcattccagcaggtcttgatgaatcaggaaagttctgcctgagtcaaagattaagttgtaggatattgacctatattagaaactgatgttagatttccacgattgtttaccacacgaacttcaccattcttatagttacaatgaatcctaccatgcagaggattctttttcttccctaaattcttcagtctggattaaagtccatctcttccatccttgtaattaaaaaaaaaatatgtattaagcatgcagtatttaccgggcactcaaaatcagagctcataagttactaagaagatagaaaaatctagaaaaagataatgcgttatgtattccagccatacctggccacttgaatgcaaactgattactctttctgagctcagcttctgtgatagaatctggagatctcagccatgcctcccagaattgtcatttggaaacttcactagcactctgaaatggttttcaattaaaaatgaaatgcagaggctgaataataactagattagtatggcaattggtttaggcaactttatattttatgaatgtgagcaaggtgtcggtgagggatgttttgaaaggctgtcagacttgtgacacgaataaatcaaaagtattccaggcgatggctgttactggggcagaaactcatgtaacatgcatgatacatttattcctcttatcagaaataagtatagtttttaaagatgtttaatggattctgagtgccaaaggttgtaaatattgaaacttcttatagttgtatatacatgctgccaaatacagccttggtccttggagagatgggaagacatagataatgagctaccacttgttttaaagtggtttgaaaaatcaggttctttggatttctgaccattgcaaaaaatagcctcaaatgcagtaaaattcctgaggacatcataaaccaattttcccagtccttgggcagcttactgccaactgtctcagttgaatagaaaactatagtttgctctcagcaacccacttctgtgtgttttgtttctttccgttgtggtgtcatcctctccacacagttaaactaacagagagtccgtctatctaggttctattatcttatgctggttgtaaacaaggccagtcctggcttgcattcagcaatgaacagacacaaacagctttctgtttcagaggaggaagaggaaatcagatggagaggaccgttaggagtgttggttgggttggaggcacatattacgcatttgaactagtgtttgactgagtttttgaggtggttctaaatgacttccaggtggcctcagcccatgtgtgcagaggaggctgttcatgtttaacagtgactctctttcactagcttcttttttgcttctagtgattatagtggacaccacatattattggctggtagatgttcctctcaactctacagaaagacaatttcaagttcttaggcctgctttctttgtgattttggatgactcttttatattcctctggcctgaggtttttcacacttgaaattggattttttttttaaagaattgtaatgtatggccttccagaacttagcagggcccttaggtttcactgtaaggatggtgaatttgagatcaccacacagtggctgcaccaggtccaggactccgtctcctgagcacaggctgccgctccttatttctcagcatctggatgagtaagaggacttaggtgagaaggcaaactaccagggtatagcagaagaagtgcaggcttgggccttggactgccttggtgttactacttaatgatctctaattttcctattctctctaagcctgttctcatttgtgaaaggggaataatccttaccttgtaggttgtcgtgaagagcaagtgattttttaacgtgtgcatctgtccctgggcaatggcctgggtcatgtttataaatccataggctcaagtccaccgagggagctgcccaaggtcagcccaagtgcccaattctcagccaaggagaaacccagatgctcccacagttcagaccttattcctacctcatgcaaacctcttttcagcccacccccttggacagttggtgggggatggagatgaggggtgtgcgactgtgtctctcttctctgttacagccatctatcacacctgtgaggcctccaacttccagtgccgaaacgggcactgcatcccccagcggtgggcgtgtgacggggatacggactgccaggatggttccgatgaggatccagtcaactgtggtaaatgcaaattccccagctccctccctgagcctccccagtgtctgctgttcaggaagagaggccacagagagccaggggatgaaatgctgttctcctatgcctgtatttacactctgaaaccaaataagcccatctactttctatgttatattgccatatgatgtatcagattatattatatagtcttaagagttgcaggcaagcagtttgccccacacacaaactatataaaatgctgccacgtaaacaaaatatataaaatgttttttgaaaccaaatatgtttaaggttctctatccttttgccaaacattccaagttttcaggggatgttagttgtctacatgttgttatacattctactccttaagtaaagatgtttatgcaactctgtttttgtgtagtaagcattttcatggaggatgcatattcactttatgctaccataacctagtttacatggttgcttcctggttgggtgtttgaggtttttagatttatactgttatgctagtaccactattcgtgtctttggaaatggcctgatttttctttgagatattttctgagaggcgttcttcagtatggagttgtaaggtgaaaggttctgaccagtttttgagtctctctgttaccaaattgggtttccaagggattacatcaaatgtgtctctaccagtaaaacgttgcatgtttccccaagtctccttgatattagatttgtatctttttagttgcttccactaatgtaatatgtgtgtttgcctcatgtagttttgatttatacctcttttaaaatactttttctacctagtgacattaaccatttctccaaatagtggtgcttgtttactgtttctgtttgatatcctttggctaatttcccagaaatgattactttttacaggattaaaacacattttcatacttatacctaatcctcaaggaactattctacacagagctcagtttgcaaaggctatctatgactgcctcattagaagtgattttcttttttttttttgagatagggtctcactctgtcacccaggctggagtatagtagtatgattgtggctcactgcagctttgacctcctgggcgcaaggcatcttcctacttcagcctcctgagtagctgggaccacaggggttggccaccacgcccagctaatttttgtatttttttgtagagatgaggttttcgccatgtggctcaggctggtctcaaactcctgggttcaagtgatctgcccaccttggcctcccaaagtgctgcgattataggcacgagccactgcgcctggccagaactgattttcaagtccaatgcctggcaataactttttgctcaggagaaagggtgacctagtactaaagattctgatcaagataccttagttgtagtttaatttcccctggaactgttgtgaaacctcaggctcttagcatttctaggcaaactttctccaaaacaactttgctttagaattcctccagaattaaggtggtgagtgatttaaatagctttataaaactaggatttcatactcaagattcatattgtgctttttctattcattgaagcttttctttttcttctaaaaaatatacttagatcaggtatggtggctcacgcctgtaatcccagcactttaggaggctgaggcgggaggatggcttgagcccaggaatttgagatcagcctgggcaacatagcaagaccccatctctacaaaaatacaaaaattagccaggcacagtggcgcacgcctgtggtcccagctactcaggaggctgaggtggcaggattgcttgagcacgggaggtggaggctgcagtgaactgtgatcacgccgctgcactccaggttgggtgacagagcaagactctgccttaaaaaaaaaaatgtatatacacacacacacacacacacacacacacacacacacacttatcaaaatggaaatgttcaaaatagaaaagatacaaaaagatataatctctcaggtgtaggttgatctcctcacctgcccagttcccactttttcctaataggaaaccaagttgtatattttttcagaatatttttgtgcatatataaacaaatttaagtatactctgtattattgtcctatttcatacccataatgtttaactttgcgtattgttttgcaccttgtttttttcacagaactgtttatctagggcataatttttatagagcacttcttgcatctctttatagctgtctgtgttccagtgtacagtaatttattaaacagtctgttattgatggactgttttcaatctattacacagttttgcaatgcaacacttgtacttgtgggcggttttcaacctgttacaaacagtgttgtaatgcaacccttgtacttatattaagta[450 bp omitted]ctgagttgatccctgagtacttggctaggactcctggaggctgatcgtggcagagagacagggtttggttaaaggagagcaggaaggaagaaagcagggttgggggcgatggtgggattagatcgaacttcagtgaaagttattgtttagttgaaatatgttctattaattgaccagttgttttgaatcggccacttatttctacttgattggttttgttagtgttgctgagtatcactgggggtagagtgggggggggggcggggggggggcatttttaggccagatgaccctttttatcttcagttttctttagccccagaaagattgccttgggtcactggtgctcatccttgattatatattggaatcacctggggagctttaaaaccacctggtgcctggaccttacccccagagattctgatttaattagcgtaggtgtggctgggacttgggacatttatggtgctcctggtgattctactgtgcagtccgggttgagagctaatgttatcagtgcagggagtggcaaactagcctgtgggcaaaatccagtccctaacctgctctattaaatgaagtttgatttgcatacagtaactactatttgtttacatattgtatatggctgctctcatgctgtagtggtggacttgagcagttgtgacagagtctgtatgacctgaaaaccctgcaatagttgctttctagttgtgttagttggggttagttggggttctccagaggaataggaccaataggatatgcatatgtatatatatagatttactttaaggaaccatcatgcaattttggaggctggcaagtcccaaatttgctaggtgagccagcaggctggagacccagggacacactgaggctatatagttcaagtccaaaggctgtcaggctgcaaaccttggagagagccagttgcagttcaagtacgaaggtcttgctgtgtcctcacatggccctttctctgtgtgggcattcctggtgtctctctcttctcaaaggacacgaattcttttgagtttaggccccattcttatggtttcatttaacctccattacctttttaaaggccctatctccaaatacagtcaaattggggatcagggcttcaacatacaaattttgggggaacacagtgcattccataatattagttccttacagaaaaatttgcctacccccgtattagagagtcagtatctattaatcatgcttgagattgggggtttgatgccagacagctctggatttcacttttggcttcatcttcatcagctgtgtactcttggcaaaatacttaatgctactgcccttgttttctcattttgaattagcgacaataaaatctctcctaatgttgtcttgagggtttaatgatgcactttatgtcaaatgctttagctctaggcttggcagaaaacaagtgctcaataaattgtggcttttactgttgcttcctgaagccacatctgtactcgtgtgcacttgcccagggctagagggcccagccagccgcagtgctcatggcctcttcccttctctggatcccttacagagcccctctgtacgcacttcatggactttgtgtgtaagaaccgccagcagtgcctgttccactccatggtctgtgacggaatcatccagtgccgcgacgggtccgatgaggatgcggcgtttgcaggatgctgtgagttggggcaggcaggggaggtgactcacggtcactaaagaacttgcatgggggtttggccaccctggggttgtgtctctatttaataactgacaggtcttggttgagtgtcgagggtttgaccaccctggagttgcacctctatttagcttacatgtctaggttgagcatccaagcttgccttttctgagaaagactttcttttgttgcttaaggaatcctgcttttcagttgtgggtgtatgtataaggggcaggatggcgagtgaccagggtcttggctcaagggtcgctgaaagtgagaggcctttcttgccagtactgtatcagatggcactcccagcgtgccgtagccccttaccctgcttcgatgatcctgtcacaacttgccccaatttggacctgtctgttcattttgctgcctgagctttacaggagcaggggcttgttttgtgcattgctatggccctctcctaaaatagtgcccttcttggagcagctcttatatttgtttcctgggactgctgtagcagagtaccacagaccagatggctcaaacaacagaaatttatttcttgcaagcctggaagctagcagtccaagatcaaggtgtcggcagggttgggttcctccgaggcctctctccctggcctcatagacggctgcctggctgccttctccctggctcttcacacggtctttcctctgtacacatctgtgtctaaatttcctcttctgtaaggacaccaggcctattagattcgggccacccagatcacctcattctaacgtttcctctttcaagcccttatctctaaatacagtcctgtttctgagagactagaggttgggacttaaacacatgatttttgggaggataaactcagctcataacacgactcggtaaagattcatggaatggattaattaacaaagtgtgtgctctgtttagattaggtttggcttttgctttcaaggcatggtttagccagacagtcctttgccagaactcactgctgttcccccttgcttctgggcaccactgctgcttcgacccctcagcatggaagttcctggacttcatggatgtttgttccctctgtagcccaagatcctgagttccacaaggtatgtgatgagttcggtttccagtgtcagaatggagtgtgcatcagtttgatttggaagtgcgacgggatggatgattgcggcgattattctgatgaagccaactgcggtaagatgtccagtctgcctcctcacatcctaatcctctagttaacagtgatgcctgcagttacagggacactcaccggcaaccccactgcagacttggccttcccgtaactcagcagcagttgctgccagttcctgaatactcatacgagttgagtcttgaagggggcagctggcacccagcaggtgctagggaaaagtttatttgatctcctttcctttctgtggttgggaagaccacattatgtataaggaaggtggtagataaggaattatggtaaatattatggagtgacctccccctaaaagtgacaggccacaatgtaatagttattgtcatgattggattaccatcaatagttgttttattcctttggtaaaatgtcagaattaaaattcaggtgattgttctcaggatattgtagtatagatcagaggaacatgggttaggggctgggaagatggggttttgtttagtttgtaggtgtattttttgttccccattgggtccatgaagctgccttatctctttatgggtgggaagtgtgggttgccctggaacttgggtctggaggaggatgcctagagttggagccctgtgttcacactgatgcagggaaagcaactgatgatgtggttgatctctgcagaaaaccccacagaagccccaaactgctcccgctacttccagtttcggtgtgagaatggccactgcatccccaacagatggaaatgtgacagggagaacgactgtggggactggtctgatgagaaggattgtggaggtaagaggcccctggggcctgggttagccccataaccaagacacaccagaatagttccaccagctatgcaggatgtgcctggctgattccgtgttttggggggcatatttttgtgagaggagtgactcaaattttttctgttcctctttctcattttgaaataagtgtggttggtttctcctattttcaggctatttattccgtatttgcagggcagagtgagaagtctagagccttcctactcaaagtatggtttgcaaccagtagcatctgcatctccttggaacttgttagaaatgtagaatctctgacctcaccccagacctacagagtcagaatctgcatgctaataagcccccaggtcctgtgtgctccacaatgcatttgaggagcactcatgtggaatgcagacttgcccctttcctttctggcattctcatctctgaaccaggtcgtggagtagttgcggttgaattaactagaacacaatgctttgcctcagtaggaattctcttagccaccctgtgcctcctcagccacctgtttctttcaccagcccctgcaaaagcaaacttatctgaatattaaccgaaatcaaatatagtaagggaaatctactccccaaaagggaaaagaatattgcctcttctgacaacccattatacatgatttctagattagccgctgctcagagctgtgccagtcactggcctccctcagcaggtacagctaaaactgggacatccgcactaggtttgggacatatttggtctaagatcaagctgcttctaatgttttgggtttccgtgcttggtgtttttctcagattcacatattcttcccttctcgactcctgggccctccacgtgtctgcccaattactaccgctgcagcagtgggacctgcgtgatggacacctgggtgtgcgacgggtaccgagattgtgcagatggctctgacgaggaagcctgccccttgcttggtgagttctggcccaggtcctctcctgtggtacctgctattgtggagaggaccttctgggggtgtgctctgggcacaatccaaccgggccccatgccctgctgtctgggactctgctgtgtggccaggttgcctgttactaatggtgtacctccagggaaggctgatttctagcattttttcctggatcatagatgcataggaaattggaatgggagcatctcatcctctataactggcctctgaccttcctgcaagatgccagccaccctgatttccacccaggctatggttatgccacctttgctgccttcttagtgggaaagtacaaattggaattaatgtggaactttttgtgtgtgtattaaactctggggagagagcccaattcagcttgctagttggccggcctgtccaactaaaagaagggtaagcactgccatctagtggctaaactcaaagaggcagctgaaggtctgtagtcaccatattgttggaggtggggtagaacttgaaatcccatttcgtgtgtgctcctaacagcaggcggaacagaggtgaggatcctgtgttctttcctaagcaggagtctacttcaaactcagttataataggagaacaaataattttttgcatgctttgcatgatcttttcccttcttctgtgagcatgttctttccattgcttccttgtttaaaaacatcaaaatcccaaactttagtgaacctaaagcatgtagggatctcctgggttccacccagaaattctgattctatgttttttataaaacattataaaaatgatgtttttactagggtggtctttttgccatattgagtttcctcttgttctcctgtctagaagatcaatttttgacaatttctattttccaggccctctgtgagctgattcctccttgcctccctggattccttacatcagccaagctagattcctgatcttcttcagatagacttgcttctttcctgcctgtgcacctgcagcaaggttttgccctcagcaggaactcctgtaccctcaaccttgtcttcctactttccttatcactgaaacccaccatccatcagtgcaaacagaagcatggattttatagcaaaagagaccttgatatattcatatcatcagaacttctcaaaatgtgatgcaaagaccaccctaatggaatcgcctggggtgtttataaaaaaatgtagaatcagaatttctgggtggagcccaggagatccccatatgattcttaggttcacaaaagtttgggatttctgctttgaacaagtagggtattattctcctttcaagctccacctctgtggcgctttcactgattcctttaaatgatttccatctcttttccagtctcattaaacttacccattgaccttttgattcttaactatgatctgccatatattgcttcctaattatttcatgcgtgttgatctttgcttccatagccattgtgtggacttcctgtttgggaatcatgctgtctactactttgagtcctgctctgtgtctcctacaataataggcaaatagtcagtatcccctaaaatgcttctcaaattaaaatgaattgtaaaagagaaaacaaaactttgtgtctgtcctttctcctcaaggcctacatatttattgaataacttgattatcctcttcaagttgtttttgcttattgaaactctgaccaggacattaatagactctagcaaattctgactaatccagtgatcagatctctgtttatatatcctgttcagcttttgtactttcttttttgtgcgcagtgctgggacaaatttaaactcattgttatctgtagctcgtggatcttctttgtttagtgtagaagtcttctaactggcttattaacctcatatttctccccctttcagtttttcttctgataaggcccatactgatgaatgctcatgtcctccccagtattggagccctctgatgcctcccttattgtccagggcatgatttgccttggcctggcattctccccctttttattttttatcacctgtctccatgtaccttgtgtttctgcagagtggttctgagatatagggaaagcccctttgaaaatccaatgaaaactatagaatatgcacaatatcctgaagttaataattgcttttttcatttgtttgcttaggttgttttgtaccatttgccaatgctttctgcctttcagtcgccactcaggataactttccacaggtcaacatgtccagggatttatcaagtccagtttttctcttggagatactccttctaacaacgtggattctcctttcgggacagattgttctctagtcctgctgtgtgcctgttacccagggactttcactgcctccttggaattctctttgcctttctcccagtttagattccttgtttcctggatcttgtgtgttgctttttcttggtttactcccttgtttgggtggagtgcatccttcagtagccttgtcaggtgaatatgatgacgcagtggccaaggacactgtgatgacagctctcaggtgtttgtctcttgaattttgctgctctggtttgtattggttgccctgtatacctggggcacaactgccttttaggacgttgcaccatcatcatcttcaggatttcctttacctccatctcctgttggaactcctgttttctgtgtcccagtttttctctttttagtttaatcccatgtttcagtagagcacgttttctggaaaatgcctgagaaaatgtatgtgggaggcctgtgtgaggtcttgcttgtcttaaagtgttttaattctgtcttcagacttaattgatagttgggctgggtttggcgtgctagattgtaagtaattttccttcagagttttgaaggttttgttccactgccttcaagcagcttttcggaaatccaaaagccattttgattctgatttttttttttttgtatgtaacctgtttttaatcctctagaagcttgtagaatcttccctttggcaccagtgttttaaaatttcacaatgatgtgctttgctctgagaccctttccatccaacatagcggacacttgcatgctttttgatatggaagtttatatattttagttcaaggaatttttcttgaagtttttattaatgatatttccctctctgttttctcttatttcctggaactcttgtcattcatatattgtctcctgatctggtcttcttccttatttttttgtttaatcttttatagttttgaaaattcccttcccccacccccccaattttctaggagatttactcaactttatatttcaactctttgctgagtttttcatctttgttgtcatggttttaactttaagagcttctccatttttaccactgtccctttttatggtatcctgttttctttttttcttggataaataatatattctttctttctgaacgtattaaggatatttgtttttgaagttttcttcttgcaaagcctctatttcctccaaatggcctttttgggggttagggctctgtttggctttctgcctttcatgtcaaagccttttctcagatagttcttggttgctgcttgtatttaaggctggggactaaagtgctggtaagtaattctgagcacatgggtgggcttgtcaacttcgaggttcatggctgggaaccatgggggaactctgaatcttggttacttcagggttagtctctgaagctggtcattttccccagagaagattattagatctcctgcctagacaataattaccttattgctaggatcctcggagaagaggactgggacttccatatgtaggtttaatcccccttttatcagtaggatatacttgctgtcaactacgcctatctaaacaactctctgtttttactttctccaaataacaaccctccattcttctattggggtgacgtatgggttggttgcctcgtgggactgataggaggggatataaggaatgtagctgcgtcttaaacatcattcagtcagttcccttattttaactccttcttcacttccagttagatgccagtttctgaacttttggaggactgtgtgttgttgatctgattggttctgagctttctcctgtgacggcttagggtaggacgcagccttcgctggcctctttagtcacataccgctatctgtcttctttccagctcccaaatctcattatccatgtcctcgtggatttaggtctttgaaaacaatctcttgactgtggctttagtgggatcctgtggggaagcaacattagatgtctgtatctactctgctctctatccggaactcgcatttgtcttcaggttcccattgtaatttctaaagcaccgtaatctcctagcatattgattggttgctgttattggccagctccctcaatattaaaaagtaaattttaaaaatcttttattttagcaaacgtcactgctgcctccactcccacccaacttgggcgatgtgaccgatttgagttcgaatgccaccaaccgaagacgtgtattcccaactggaagcgctgtgacggccaccaagattgccaggatggccgggacgaggccaattgccgtgagtagtcagagagcccttcaccccctgggcacgtttctgcagagagcacagttctggtgcttctgcttcatttctggatcagcacacgcctgtgtgtgagtctgtgtacttgcgtaaccatgctcttactgcattctccacaagcgctttgccacgtgcacccataccattgcgttagtcaccttctttttaataagttgactgcgttttaaataccaggagcgtgtccaataaaaatactttctgaatgactaagataaatattttaaataggtttcataagcatgtttaactctttaaaaacgcccttggggaaagccacaactcttctgtatgtacattcattcttctggaagtatttagtgagcacttactgggcgtagaagctgtgttattagagggtttgcctctagcaccccattaagaaaattcattctcagtccttagggtaattatggttggtgagatagtgtgccgagccacatggggaataatcacagggccatctgagcccagtgtgaggtgatgcatgcattctctacgggtttggagttggtgggtcctggtgtttggtcctctgatgaacccagggaggatctttgcagtgagtgatggagggagacactggcttctgcaagcgtttatcctcatgtgaccagtcagcgcttttcagtccctggctgcacgctaatgccgccgttggctggtctgtcctactgtagcagacttgggagggcatggctggacggtgcttatgcagccccccaccggcctgcctctctgacggttgggtgctgctctggctcggggatccctgctttgcgggcctcccctccatccagtctcctgctggctgcagacagcagacgtcctagccagtcacactcccttccttgccaggataagggcttcgtccgtgcttgcctgattcctgtcctggtgaatgtagaagacgcccctctcactctctgctgagagcctccctgccgccaagccctaaccctaagcagcaaacgcctcagttcctccactttgatccctgttctggtcccattttttttttaatcttaaaataatgacttcctcaaccaatgaaaaactgagcctcacttggaatcctaccaagtcttaccatttagagatggaatagaatctgaggtggaggttagtcatctcttaattcctctaattcagtatttacaaaatttatgggacttagcaggatcatgtggaagtgcttataagagatgtgaatttggtgatctcacctcagaccactgaatcaagagcaatggtggaggagatgctcgggaacccaagccttttcagaggtgccctgtctgattcttagcatcagacaagattggcaaatactgctctgtcctaaatagttcacccagtaaggctcagggggaaagggaagagggagtcggccgtcccttctctgtctgtagcgttgttctccacagggtgcccgactgggctctccctggagaggcttggttaagaggaaggagtgtggatccagtaacatcttcagtttggttggacaaatttttgttgatcatgcacagcgtggcaggcattgatcaggtttctggcaatacaaattctttgtgttttttttctggcaggcattgatcaggtttctggcaatacaaattctttgtgtgtttgtttgttttttttttttttcttttgagatgtcatctcgctctgttgcccaggctggagtgcaggggcgggtgggatctcagctcactgcagcttccgcctttcgagctcaagtgattctcttgcctcagcctcccgagtagctgggacgacaggcatgcggcaccatgcctggctaattttatgttttcagtacagacaggttttgccatgttggccaggctggtctcgaactcctgacctcaagtgatctgcccaccttggcctcccaaagtgctgggattacaggcctgagccaccacgcccggtgactggcaatacagattctagtgggagggacatcaagtcagcagctatcctacagtgtggtgtaggcagtagcagaagttatccaaggaactggcatagtttgcaggtgggctagcttcctggagaggtggggacaggccaggagaggcagccccattgatggtgcctggacaacggtgggacaaggtggcagatgatgggcattctagacacaagggacagcatgtatattccaaggctcagaggcataagaaaacagacctgtagagtggctgtgggtgggacaaaggtgagtgcagagaggtaggcatgaggtagatagggcgacccctgtgcttggagtttatttttctggtcctaaggagcccttgaagatttcagagatggggtgtttatatcttagatcacttggacttcatcatggggggaatgggttatagaagaaggctgaggtgagattggaagccaggtgcccattaggaggctaatttgatgggactgtgaagatgaaaaaggaagagtgacctctttgtatattggaggtactattaacagcatccagtgagtttttttggctgtggtaataaggaaaaaggaagaatgagggttttccccaggatgacagtgaaagctgatgctaccagctatgtgggggttactgaggatgaggagtcgcagctttccctgggtggggctagcacgatggtgggttcattgattgacatcagcatctgaggtagtgcaagtcatcctggaagaaactgaaaaggggaggtcagaaaccggggcattcttgtcttccttttcattttactgcattaattgtccatgcaagtgatcttcgcttgcctgttgcaatgagtctttgccagttttcacacttttgttgttccttgtgatgatctctacggtgatggacttctggagacgaatttcattctaggccttgatgtgctctgacttgagagaaaaatcatcttggccaagtccttaacttgaaatatgaaactaatttatttccaccatgcataggtttttctcctaacacttggcttttcggaggggtcccaggacccccatcgttgatgcgtcctttcctctccaggaatgtcacttttgcttttgtttcggctgcctgaagggtcttttctttgactaaaagtcaaggaattggataagttgctacctagaggtctttttttcaagaaacaccctttgagtctttccaattcttcaatttccaaggtagggtgatttctttttgttttgtttatttatttgtttgtttattttagtttaggaaaatcataaggaatctttcattactaaactattcctgttggaactcagatccattttggggttggatttctctctgtccagaacatgccacttgttatctggaacccaagaaccaaaaagattaagataatttgatatctcttgatacttgtgtataaatccatataaataaataaatgaatctatataaataaaccaaataggccaggcgcggtggctcacacctgtaatcccagcactttgggaggccaaggcgggtggatcacctgaggtcgggagtttgagaccagcctgaccaatatggagaaaccccatctctactaaaaatgtaaaattagctgggcatggcggcgcatgcctgtaatcctagctatttgggaggctgaggcaggagaattgcttgaacccgggaggcggaggttgcagtgagctgagatcgggccattgcactccagcctgggcaacaagagcgaaactgtcaaataaataaaaaaataaaccaaataaattcagatggtgggggatattttaatctccttggttaacatttccatattacatctctttctcatttctttgtcatgtctttcagttgtaaggttgagctttgtcatttactttcaaagttaatgcaagtttgcacaaataagtgtttggatttgctgatggagtttgtcttcaatataattaattctcctgctgtgtacttttttttttttgaagttcttcggtgtttagcaggatgcggcagcctttgataaaccttaaaagattcttatttctctttctgtcgccttatgcctgtttgctttcctgcattttggctgttttgtttttcactttgctttatcataagtggtctttttcaggctgcttctgctttactctttctatttgctgtggtaatattttctgatgctttttaaagtggccctatcttctttacaaagtcattaatgaccagatgaaaacttggaaggcatgcctgtcatacttgcaagtaatacagagttacccagatagcttattttctggcaaaacactcaggatttacaaagggaagctaaactttggtggtgggttttaatgtgctattcattattctcaagcaaatcatgtattcgtttcacttaattctcaaaataactgcgattttggtcttatctcctttgtggagataggagaattaaggtcccaagaggatcacctagccagtaccagattgggttatttatttaggttgaaagccatgttgaaagttctcatcagggaagaatacaccaaaactaacacagatgaactgagtagggattagtgtacagttctacacttacattaaaggaatgaacaaagtagactcctagagtgttaaaccaacagggacaggttgatcccacactcaccaaaatgacagtaggaacatctgaggcgaataagcaaccacataataagatgaacattggagataattaagaaagagaaaagaaatgggacctccctcctgggtgatattaattcattaattggcattctttaaatcagtgttttcagcctgtttccaatctggcttattcacagggatgttgcctggtaaagggtcttaaaatcaagatgtgttatatccacggtttttttccaacattaatttgataaccttatctaaaaatgaaatgagattagtgtggtgcgattctttttagagaacctgtcccctgaaggcgactaagttctattctaagtgcctgttaatcatcggttaattatcagtttaagaattttcagagttaatgacaactttattcccagattctattgtttttttgttttaatttaaggctctttttttttattatactttaagttttagggtacatgtgcacattgtgcacgttagttacatatgtatacatgtgccatgctagtgtgctgcacccactaactcgtcatctaacattaggtatatctcccagtgctatccctcccccctccccccaccccacaacagtccccagagtgtgatattccccttcctgtgtccatgtgatctcattgttcagttcccacctatgagtgagaatatgtggtgtttggttttttgttcttgcgatagtttactgagaatgatgatttccaatttcatccatgtccctacaaaggacatgaactcatcattttttatggctgcatagtattccatggtgtatatgtgccacattttcttaatccagtctatcattgttggacatttgggttggttccaagtctttgctattgtgaataatgccgcaataaacatacgtgtgcatgtgtctttatagcagcatgatttatagtcctttgggtatatacccagtaatgggatggctgggtcaaatggtatttccagttccagatccctgaggaatcgccacactgacttccacaatggttgaactagtttacagtcccaccaacagtgtaaaagtgttcctatttctccacctcctctccagcacctgttgtttcctgactttttaatgattgtttttttttttttttttaagaaacagggtctggttatgttacccaggctggtctcagactcctggactcaagcaatccagcctcagcctcccaagtagctgggattacaggtgcacactaccgcacccagcttacttccagagtctaaagcccatgcttttttgctcttaaaattttgagacatactttataaagaaacctccaacgtcctcagctctactgcttagctgttgtttgattatatttgaccacattgttacccagtagaatacttctgtgatgggggttttggtatttttcaaaataatcccctctgggcatagtctctccctggcaatcctatataaaatggcataacctgatcagattaatgtacttgtttgcagtttctctcaatagaagataactccctgaggacaggtccttcatctgttttacatatccccatatttttaacatctggagcagtgcccgagtcatggtaggacctccatgaatgttcacagaattccatcttgggcttctgagactattacagtagtggttctcaaacctttctctaattcttgaatacacgtttatttgtcatgagcttccccccaccatggcaaaccaatttcagctcagtatataatagaattctgaaatgcaatgatcttcctggagaatgggggattatagtttgtgaaaagcctcataagtggttttgatagttcccttctattgacaattttttatcaggattgtttttgaataagtagtgaactgaagtctgtacctccatcctagagactcgtgcaaagaagtcttaattcttctttctcatgaaaactcatcagtggagaacacttgtcagagtggtctgcatgtcttctcaccacctcccccatccttgtatcttttcacctctaggaaaatatccctggatcctttatccattcctcttgaccatcctggttgctctcatgggaacattatccagtttctctacctatatctcaaagtgtggttgtttatgttaggaggaaggagaagagggagggggtcgaggtcaagaggtgacccatgaccacatgcctgggtctgaagtggggcgtatgaagcttccttgctcaggtcacaatgctcatatcacctttaacataactttgttacttgtgtgtacactctctttatttcctcagggcttagtttcaggaagggactattatcatccttgctttaaaattaaactataaacaaaattccttccatagttagcttggcctacgtgcagagataggcagaggccgttaacctacaagatgtcaccatgggcagggggcagggtgcggggagcagaatggagccactcatgttcagcctccttttgtctgttataatttccccattttcaaagccagtgatgttgcatgtctctcacctgtcttctgtattctctctgtctctcaccacaaccagaaaagggtctctgcttttaaggacccatgtcattagacagagcccacctggataatccaggctgaactctcctacctatgggtccttaatctaatcacacctgcaaagttgctttgttacataaggtaacatattacaggttccagggattaggatgtggacgtctttgacttggaggagcaagattgattttagaccctcatcactggtgggattggatttctgatgtagcccttccttgtccaggactgggcaggcaggtgtgaatctgtataaggaaggcctcaagttactgttcctgggctcaaccagctacatagcagatttgtaccacccaggtacacagcctgcatagcagatttgctgtctacagccattctcaccttttctcttttcaggagcatttgcaattatacggtcattgctttctttttggagcctcccgtgcagttttaatctactttcagaactggagagcacatcacattttggtcaatagcctagacatacagttgcataacccttaacttaccagtgctcattatttgcattatttcattttctgttcaagtactttgaaaagccaaacaactttaaatactacataaagtatgcatgcctcttaatattgttgggattcatctcattgttatttctgttactcaaaccagaaatcagctcctctttctagattgcaaactaataatagtagcagaataattaatagtactatagagtaatagctacagtttgttgatgccggccaggagccaggcagtgttccaggtgtgtgatctcattagatccttgcagacatgatagtgatggaattgttacttccattttttatagggcaactgaactcaggtgatattaagctgtttgctcaagctcatgcagatctaggatttaaactctagtttgtttgactccaaagtgctcactcttcccgaatgcagattccagttgttaatgttagatgagatggcaccttagtgccggtatagattccaccactggtcattccagaggtgtgttttgaagcagaagccaattagtactttgcctaaatgggaataaacttgggcccagcctttagtaccatacggcccctccccgtggacttaagaagcctctctgtgtttcagccacacacagcaccttgacttgcatgagcagggagttccagtgcgaggacggggaggcctgcattgtgctctcggagcgctgcgacggcttcctggactgctcggacgagagcgatgaaaaggcctgcagtggtgagtgccggtccacgggctgggctgggctgggctgggctgggaggctcgcttaccccagggcccctcctgtgtagaccttgagctaggacccttttgaactgttgctcaatctaaggataaaacagatttgtgcctagttttggagccccaagtgaggtgagccttggccagactctgatacaacatgcagctgtctcctccctgttagtgaaatgctagtcttggatttttttttttttatggacttcccacctcatgcccatacaccatggctctcacagtctcaatctgctggtgggattaactcagttcttatctctggagtgtctagtaatggaccctatgacatggtccttggacttgtagcattctctatggagaaataggcttaaattgtcataggcaggaggaagatgaaattcgagggaaaatatcacgaccggaaaagtaggagaccctaggagggattgtatagggaggtttcaactacattttctgagatttcttttcagataatgattatggcctcctgataatctagatcatggtagttctgtttaaaagcaggagtcctttgaaatctaaggatttgtaagatgtaacttttttttttttgtatttttagtagagacggggtttagccacattgcccaggccagtctcgaactcctgagctcaggcaatttgcccgcctcggcctcccaaagtgctaggattacaggcgtgagccaccacgcccagccaagatgtaactttgtttgtctttttctcctttatctctctagatgagttgactgtgtacaaagtacagaatcttcagtggacagctgacttctctggggatgtgactttgacctggatgaggcccaaaaaaatgccctctgcttcttgtgtatataatgtctactacaggtaggtcccatctttgtcatgggagatgaaaatgatgtcttcattgccccaggatgttctgtaaactctctagtggcatgcaccatgctattaacggagtcagacatctcagccccccatgctgctccagtgtgacaatatctttatttttttttgggccagggtggttggagagagcatatggaagactctggagacccacagcaataagacaaacactgtattaaaagtcttgaaaccagataccacgtatcaggttaaagtacaggttcagtgtctcagcaaggcacacaacaccaatgactttgtgaccctgaggaccccagagggatgtaagtgtttcagttaatttttatggcatgggtaagacctcaggtcggggtttgtgagggtctttctgagtattctcaggaatgtgggaacatatgtgtgcctcacatgtacagaagtatggtggctaagctttatagtcttgccagagttgtcaaacatctgttcttcttactgcatcagagactgttcttgtaccttaagttaatttaagattctctccaccattgccctcttgcattttttgtctagtttctacctctacgttcctcctctagatatttcctagtacttggtacttaggaggaggtcatcgtcattaaaatatgaggcatatcagcaattttgtggctaagtttttttctttttggagacaaggtctcactctgacacccacactggagtgcagtggaggcgcaatcactgctcaccacctcagtcttcccaggctcaggtggtcctcccgcctcagcctctcgcatagctgagactataggtgtgtgccaccatgctcagctagctttttgtatttttgtacagaaagggttttgccgtgttacctaggctggtcttgagctactgagctcaagcaatccacctacttcagcctcccaaaatgttgggattacaggtgtgagccactgcacctggctttgtggctaagtttttaagaaatttaccaaatttatgtgtctaagagagttcctcgcctcctccctacttcaaagtagttgacatgagcaactgtctgcttgaatgtcatcttttttcattgcctaaagtatcctgaatatgctagcgctaaactcattaaggagcctgctttgaagatgatcaaattcatttggatatagaaattctgtgatgttacaaaattagtcttattttttggtagtcatgcccacagtacagtttttgttgtacaagaagcagaggcagcaggtgctgtcattgacaattaagatctcagcatggaagtctcagggtcagtggtgactcagcctgcccaagtgattctatcctgcagcccttatgagccacaaatttaccacacactcaactgagccatgatgtgatgtgtggacggcacaccttgctttttggaagaagaggaaaagtgtcttttcaatgtgacgaccaagctagcagcctttctagtggatagtctcaatgccggctgtggagtcgttcttgtccttgttctaagcccaggaaaattcctctggttggctgctatgcagatgggttttaaccttgagttgactctttttctagtgccagatgcccctcgaaatctccagctgtcactccccagggaagcagaaggtgtgattgtaggccactgggctcctcccatccacacccatggcctcatccgtgagtacattgtaagtaccttccatgagttggctgtatgtgtgttgggggtgctaggagatttctgggtattctgtatgacgagggggttgatttggtttagctttgtaggtgatgacccatccgtcagaacattttgctcctcaccatcttttctctcctccagcctccttgcaagatattaggatgccctggacctttggttccctttactcacattttttttcttctccctttaggtagaatacagcaggagtggttccaagatgtgggcctcccagagggctgctagtaactttacagaaatcaagaacttattggtcaacactctatacaccgtcagagtgagtgtcgtcatccattccagccatccatgcagtcttagaactgagcgaaattgctgctgttttgtgagaactctctactcacctttgtgagatgcatattagtaatctgcaaaatacccaacttcttgccctgggacgggggagctcagagtttctttcagtctcttaaatggacaccacaaagagcttgacatcagagtttctgtagataaccgggcgtttatgggaatgccgctttccctgcttttaactccggtattctgctagctttccagctcctatacttttgcagtcagctctttcctgcttatctttagctgcaggatgatgcagagctatgataagtagtctttctaaactgattttatgaggttcttatgaaatatatttttagtatttttagcagaaagagatagattttgtgaacaacatgtttgctgagaccattaagtgtgcacattcatgactctcacactgataattttgtcagtaccctttttgtatatgtgtgtatttatgaacacacccccccatacacctgccctttagaagaaccttgatatttgtggatcaatagaaattttctgatctcaggactgtcataatgccctttacccaagctccttcccttggcttttttgccctcttatttcagatgctggggcctctgaatattctggatcactctgtataaaatttttccagcctcactgccaaaatctcacccctttagctcattcagtattcttactgtatggtgtatggtgtattgcctttatttcatattaattcaccctctgatttgaaaaggtggctgcggtgactagtcgtggaataggaaactggagcgattctaaatccattaccaccataaaaggaaaaggtaaatgatcccagcatttgcagatttagagaaaatattatacaaaccctttcaaatgactttcagtatgaccggaaaatggagaaacgtagtttagaaaaacatcacacaactttcttctccccaacacacgcacatttttgggtgtctctgtagtgctttagatagagtctttttggggtgactgagtgtctttttcctcctagtattgagcatttcttctaatgcagacatacaaagggatttccaaaggccatcatgcgcagccctttgtgagtagtcaaaatatctaaaatagaaggagtccttccttctcaccaaagctgaagatgattttgtgcatgttcacttacggggttttaaagaaagcaccatgctgactcttgttattctcccagtggcactggcaaactgtgtgtaggtggttttttatcttgtactagagctgatattagtaataactgatggcttgccaagggcaggacactctagagtgttcactgctttgcgtacatcagctcatctaattgaacagtcagaacaactacaagaaaggataaggaactggaatgaggttatgtcacttgtcccaggccacacaatcagtaagtgacagagctggccctggaacctgatctgcctgactccaaagcctgtgctcttaaccactgtgctccacgcttctctctgggctgagacacatgcggcctactggaccgccctgcttgccgggggtggcgggctcagcatcttgcacgagtgcctcatgagggcagagatctggtctgtttttctctactctatcacgggcatctagtagagactaaggaaataattgatgattgagtgaatcgaagcagttaaatgaagggttctggcatactttgggagatggactacaactcattttccagagtggttttcctgaccttagccttgacactggggacttgcatttctggacttccaggtattaaaaccagatggacactgtggcatgcaataggactggaagattttactttaacctaagcctgtgaggaataggctctgggtcatggagagtcactatctagtcccctctaaaatctggagcctttgagatcagggcccaaggcggccaaacgtagtgccaccagatggtctttggagctgaatgcttgcaggtattagagaaagcctgctgaattcacactctcctagaatttttattgttgtatctcttctctctacaaagtctgtttcaaaacactgaccacacataccaagaagggatgttggaagagcaaccaaatacatgtaccttgaattccgaaggcacaagtcacaactgcatttgaaaatctcagtggatggttggttctctttaacttcttttctgtgattttgatgaatctcagctgcttgcatatatttgggctaggatttgtacagaaggcagctgtgtgccacatccaaaaagtgtttgttgtaaaatatctgtgacatagtatcataataacgttttaagataaaggacaaagacagcagaggcatcagccagacgcgccaggttaattggtgaatgtagtggattagtaatgacaatgagaaaagccaccattccctgagcacttcttatacactaagcaccatgctattgttgctcgtgaatggatcccttattaatccttatgaatcctatgagataagtatccttatcctcattgtgtagctgaggaaatgggtttggagtggattgtgacttgtccctggttgccatgattataattcaagtcagctttaccatatgcagcactcgcactgttttgctctgtgttggccgcctgaagcttccaatatcctttcttcttccggttattgcattttcctgaagcctagttttattacatgattgatcatctggacagacctcttcagactttgacacatctcttttgccaccaaatcttatctgctcctttgagtctctcttgcccagtctatagaaggggcatatgtgtggagagtctaatatgcaagttgttgtttaaataatattttctgataatattgatccattgagctcttttagatcatgctgggccaagcactgtcagccatctggtgggaagaccttccagatgacaagcatggcgctcattggttgaactgagaggggtcttttccttggccacttctccttgccccctcgactcttagcttgagctccagtctttttgagagcaccagtggtttctagttgtttagttggccatatgtgacgctatattggaaaggaagagaaagagagtatcagttgagtgctaggcatcacacatacattattttagttaaccttcccagctctgtgaaatgcagataacatctctaggctccaggaagatcagtaacttgcctaggttacacagatgccagaacaggaattcgaactcaagtttgccagcttccagaggccacattctttccattttgccacacgcacgtttaccatttacgatttactccattgtcagccttccgaaaggacttgagattggtgggactttgttagtgccaatcaagatgccactcgcagtgaatgatccctgttcctttaagaaccaggctgaagctgggctgttttgggacctttacaaaatggaacttttctgcctgacctaattgccaggatagccgactgagccaagatagttttgtgttcaccaagcaactgtggaccaaccttagcttcaggaaaacagtggtaaaaaaagatcgatgaggaacactgccaaagaaataccctttcttccccgactgaaagatggctttgtccgttgagttgaaaactattaagtcctgccttcctcacttttcatcacgtggcttctgtttttgaattcctttttgttttcagtgatcccaccaccagatatccacattgacagctatggtgaaaattatctaagcttcaccctgaccatggagagtgatatcaaggtaatgtgggaatttcaagccagcagctggatggggctttattttgtatgggaactgaaaggacatagcacagtaagactggaaaaaaacaaaaaacaaaaaacaaaaaaaacgaacggctagatctagtgaagctaaaataccaggactagggtggttccttcccccatgaagaacaacttgagtcttcacatgtaattattctgcctcagcctggtgcctttttatccttaaccatataattaaatggttcacagctacagtgcaaataaagagttggtgttaacagaatatgtatgccctgtaattttcagctttattggatttcctggtgctaagcgctaatgctgaggcgctcacagtggaagaacaaccttcttgtgggagagttggataccttggaaacatattcactttccatccacctaagatcttcctcttccagcaccgccatcccctctactggccctctgcatagccgacttcatcattgttacctgtgcccatgtggttcctcaagctgagatccgctttccatagtgttccttcttatctgtccctcctcacagcctctccattgatgaatttgtgttgggacaagttgggacaagcaaccttcagagtctttctgccatttacttaactgccatttagtgtcatgaccttggcttcagaatgggttgatataagaaatggcctcggccgggcatggtggctcacgcctgtaatcccagcactttgggaggctgagatgggtggatcacctgaggtcgggagttcgagaccagcctggccaacatggtgaaaccccgtctctactaaaaatacaaaaattagccaggtgtggtggtgcatgcctgtaatcccagctacttggaggctggggcaggagaatcgcttgaacctgggacgcagaggctacagtgagtcaagatcatgccactgcagtccagcctgggcaacagagtgagactctgtctcaaaaaaaagaaaaaaagaaaagaaagaaaaaagaagtgggcttatatgcttcttgtcttgtagtctttgatcttgaaaatatttttgttcgttgtcccatatttaacgatcttcagatcaaatctttttatgagctcaggacttggaaaaggtagtctttcctgatgggtggatgtattttctgtagttagacaatgagatctaaccagcctgttttgtatggattgtcttcttggccttgactgcaaggatttatccttaatttccatggcctaattatctttccagtgtttcctctttctacctttattaattggttctcgtccttttattcttcattcacttttttgtttcattgaatctataaattaaatatggtctcgtttgtttttagaagtaggtggagtacaactaaatattagctaatggtagcacaagtagaacctgtttaaaatttttaaaaaacaacctgttcactgtaagaatgagatacccaaggaaagaacaggaaagaggtgtatttttaatcctgccttttgtatttagtgtgccccatgactagctgttcatctaacatgcttcttggttctcggcaggtgaatggctatgtggtgaaccttttctgggcatttgacacccacaagcaagagaggagaactttgaacttccgaggaagcatattgtcacacaaaggtaacactttggtgctggtcagtgtgtgtgcaggaaggggtaaggctggaccaatgctttcccgctgtagagcttgactgggggtgccagggaaggggaggtattctctggaagctgttctgtgttgacaggttcttgtgcattgaggatcctataagtgtgctgctgattctaggcagagggattcactcagtggcccctcgagccctcctccaacctcatgacccttagtggaagttgggggccataaggaggaaaattggacagaggcaagactaattctctgcagatgagttttgatttccaaaagaaagagttcttagatatagacagttacctgtctgtcctttctagtctggttcactctcccgttgctaatgagagacagcagaaggccttatgcataactggtgttcagtaaatacatgttgactggagaaatggacaacaaactaagggaggagtggtccagtccctgttacgtatgtaccagcagcaagtctcagctaaaattcctctatctaagcacgtgctaaaggatggattttaatttatttctaagtggcgaaagctgcctgtaactgttgagaatgacttgggagcttcttcctgtctcctccttctaggctgtgaagcactttcagtcatgtttttattgagtccttgtcatagccttataaagtagagactacaaatgttctattgttactttttttttttaactgaaagtctacaaggtgcccgaggaggctgttattttgacttttgcacattgagcacctaccatgtacaggcatttacacaggcattctacgcatattatttacataaccccaagtataattccgtgagatatgcccgctttacagaggcaaaactgaagttgaaagaataagtcatacgctcagacggtggcagagccaggattggaacccacatctttctaactccacagcctatgatctcattgccttagtgttgccccagtagaaactggcagagtcaggagcagaagccttaactagctgttgtttgaaatctattagggctagtgcgatgctaggcattatgccaagcacttcctaagcattttctttttttctccctgccagccagcagctgctgtaagtgctgttatttttttctccatcttacaaacaaggaaatagagagtttaaatactttacccaaggttatacaaccacaaagtatagagtcaggccttaaaccccagtccttctgattccaaaggctatcttgttagcgtaacctcccccttctcacttttctttttcttagttttaatagcatttcctctgatcagaaaggggatacatatttgtttcagaaaattgagagaacaaaaagagtgtaatgaaaattaaaattgcctataatttcacttttacatttcagatatcttctaatatatttttccatggattgatctctttatatcttttttctaaaatcagaataatgccataggtagtattgtatcctgcccttttcacttcacataaaattgtgagaattttccagtgtcatcaaatatttttgaaacaacctttagtgcctgcacagtagttgatggaatgcacattatttaattattatcctgttactagacaatcaaattacattcagttttttcctgctgtaacactgtgatggggatccttgttaaacacacttttgagtctttctctgacttcatgggataactggattgaagggtatgatttccaaggttcttgttatacaaggccaaatggcttccaggagcgttgtaccaactcctatccgcggatgggcagctttaaagaaattacccagtgcttgtgcagtgtgttacgtaccgtcatcatcagtacataaacgttgaatgaatttgtcatctaatgacagtcctacagcacatgggactcatttaagtcaagagattactatttttttttaaaaaagtgcatgtaccaagacacgttcttgactaacacccccaacttcctcctggaatctccttttcctgttttcacagttggcaatctgacagctcatacatcctatgagatttctgcctgggccaagactgacttgggggatagccctctggcatttgagcatgttatgaccagaggggttcgcccacctgcacctagcctcaaggccaaagccatcaaccagactgcagtggaatgtacctggaccggcccccggaatgtggtgagtcagccagaatgaccatcacaaagtgagtgtggactgtcccctaatgctacgccaccacacaactccagggcttttctctcttttgcaaatgttccggtgcccctgctgctcttggatataggcctttctttttcctttgttttcatacgtgcattatgattcactatgatcagatctgtgctcctttttgagtctactgttttactttccactcctccccagtgtgtcccctttgcttttagatcaaccgtcccaaggctcttggcacattcgtccccctcttgcctctgtacttggcttatgccctttctcctccttggtgtccttccctcctcttgctatgcaagaaaatcctcccttctatagttgatctctctccctatgaactcctaatatatttatagttggttccatatagcatgatatttcattgaatacagctttaccctatttgataatttttgtctgttactcttaccttcctaactagtttgtaagttccttgaagggaaggattgttttctggattttctcaatggaaaagcatacagaagtaaatttataataaggaattagtaaatccttagtgatgagcggaggaactagcctaggtctggtcttctgaggatatcttcagcgtgcatttgtcacagggctgagtcatagggaaataaccaaagtttgcaagtagctgtctgtaaaatcagtgaagaagaaggaagaagtaagatttactgagcagccagtaagtgccaggaacaatataaaatccgataaacccctgttcccccttattcctttcattggttctgtgggtaaatattcccattttgccagcaaggaaactaaggctcagtgaggcgaagtaacttgccagagttaaagctctcacaagcagtagactgagtttcagctcaggtctggctaatttaacagcctctgctcttttgtgtgtcccagcacctgacgctgaggcagggacagtgatgagaagccctgacctatccccggagctctcttttacctggaagttgagtctactcataaagaaccctttctttccatttatatacctggcagcacatgaccgcctcatcacccccaactatctctccagagtagggcaattgcacagaacactgaagcctgacttgatttagggtctccaattgtgcatgaagttggaggaggcttcctgcacctcatctcagctcatgcactggtcacactaaaggtggctttcagaggtgagagcgcaaatgagatcacctgtaggaagctctctgcttctgcccctctttagttcattgaggaccctggcagctctcatgattttcctgtctactgtgagaagtgccattgtcactgtgcatgtggggaacctctcatcccttggctcccgtggctctgtggacccctttcctctccagagacaccccatccctggcggtcaccagccttgtcctcggtgatgtcatcctccctctgtactctaagccccgacttggcctactcccatctcatgctttgcagctccacctgcatttgctttgggacccctttgagtccctcagcgcttctctttcctacatcctcccaggcgatcacccccttcggggcttcccttcctgtttctctgtctgtgttctcccatctgtctgtcctttctcatctgtcaacaaaaagagtcaaactctgtaaaatatatgaaaagatttattctgagccaaataggagtgaccatggcccgtgacacagccctcaggaggtcctgagaacatgtgcccaaggtggccgggatgcagcttggttttatacattttagggaggcatgagacatccatcaaatacatttaggaaatacactggtttggtccagaaaggcaggacaactcaaagtgggcatggggaagcaggggtttccaggctatagggaaatttaaacattttctggttgtcaattggttgagtttgtctaaagacctgagattgacggaaaggagatgttcaggttaagataaaagattgtggagaccaaggttcttttgacgtcttttagtggctgcctttaggggaaatagatgacagatgtttcctatccagatctttaaaaggtgcaagacttttagctaatgtctttaggattgggagggcctggaagaaaaagatctagctatgttaatagagattctttacagatgcgaaggttcccccacaaaggacagcttttcagggccatttcaagatatgacaaagaaacatgttttagggtaaaatattttgattttcttccttgtctcataatgttatgccagagtcaacttggaaagtaagtcacgatatataggattaaataaaacccatctgatgagaatttatggtttgtaggacatgactccccagaccccttagatagggatttgggcaagatttaaaaaatcagagcttagtcctcacagctgctgagcagtgctggagaaagtcaccctgttgcctgggacttggaaatccctttgtggatccccgctcagttcctgctcatcccatggatcctgcagctcctacagtcctcgtcaagcccatgtcttacatgtgcacataactcttggagaaaatgctctttgattgtgccttacaaagaaagcttcctcagctcccaccctccagttataaactccctcggcttccactttctgctgtaaacttcatcccattcccacttccctgcttgaaactccctcagtttccaacgtttaccagttaggactaagcagggatgcatagagcagaggaagtgacagtaacagtggcttcgaacagtttatttcctcttgtaattaaaacaagtttagagttgagcagtgcagggcttctgtcgtggcagcacgatttgattgggcacctgagccctgtcatctccagcctgtggcatgtgtcttcaagctcacctcatggtacaagaggcctcctgggcctgcagtcatgatctgtattccaggcgaccagagggcaggaagaagggctcctccctctgttgtaatgagccctcctaaagcttttcctgcgacacttctgcatctcaatggctggaagctctttgtctagcctcttctagcttagggaggttcgcagtttagactttttccaggcagcaattctcaatcagaaccagagttctgaggaagaaagggaggatgggtacctgttggacagccagccgtgtctgctctccttccctccctccacatacttcctggggtgttcgcatccactgtgcaagctcccatggctttccttcccactcagcacatccccttggagcccacgtctgtgctgccaatggtagaatgacaccccctctttaataaccccccgttccctggctcatcatgtgggtttctggtgtagcatctaacactctatgtttgccacttgttatttataattatgtatgtttttcttctctgcccgcctctcctccagaaggagcgctttgaggacagagaccacatcatatttatttttgtagctctacatacagtgcctggcccaagtgccttctctgtaaatgctgtaaatgtaataaatgttgaatgaagacttctctgtgagctcttttgaagcagttccagggtcttaaattggggatttcaaggaaatgagatcatcggcccatgagctgatgtcctcttccattctctgcttttaccaggtttatggtattttctatgccacgtcctttcttgacctctatcgcaacccgaagagcttgactacttcactccacaacaagacggtcattgtcagtaaggatgagcagtatttgtttctggtaagtttcccataccgtttcagttttttaagggatgtcttaagtcctgggctctggtctcaacccaggacctggggagcttgcatacctggactccaggattgatgtgtgtgacgagaggcaacttcctcttcttcataagcatcatcaggttcttgcttgaaatacagaatgaacggccactttcaccaactgcagctccgttatggaggactgataacttggcagatgatcacaagtatagataaatcaaaaatttttatcaggttccacttctaggaatttagcctacatacttttatgtgtgtgccaagatatatggagaaagatacatggtacgttattattcttatgatagcaaaagatgtgaagcaacttaaatgtctatgaagagaggactggttaaacatatcatggtttattcatgcaatggaatgcaggacagccgttcataagaagtatgacaactctaaatgtactgatatggaaaaatctctacgctatattattatataaaagaagccaagagcataatatgtgtgccattttctcagttgtataaaaaatatttgaggaagataggcttcatatacacgtgcatatatgtgtaaggatacacgtacatacatatccttccttatatatgcataggggatttctggaaggaagcacaaaaactcttaccagtggtacctcttggaaaatgatttggggtaggtgggaaattattttatattttatggttttttgtactaactgaattttaattgttgtcattattttgttgaaaaaatactttaataaagattgcataaggccatgatgtattttttttcctacgtgtgtgcttgggcttcaggtccgtgtagtggtaccctaccaggggccatcctctgactacgttgtagtgaagatgatcccggacagcaggcttccaccccgtcacctgcatgtggttcatacgggcaaaacctccgtggtcatcaagtgggaatcaccgtatgactctcctgaccaggacttggtgagtgggttgggcttccaggcctctttgtttattcctggcctggttagggtggggtgggatggaaggggatcctctaatggggcaagaaacacaggcctggtttctggcgctcagcaggaggtctctctcccatttcagtctgaccaaagatggggtccgtacagggacctcttcttagttggcacttctccattattcctagctaccattttggtttgtccctctttctcctccgctgctgatatttccttccctgaccctctcacacagggattagcaaacaaaggcctgcaggccaaacacagcccattgcctatttttttaaaataaagttttattggaaccaagtcatgcctatttgtttatatattatatctgaccactttcatgcaatgatcagcagagttgttgtggtggagactatctggccctcaacacctacagtattactgtgtgtggacccttacaaaaagtttctgacccctctttaaaaggagcattgatcctaaacaaaacaaaaaaactgccattttttccttgctctgggttgctcttccctctctcctctctccactccccttcatccagcggtggttggtttaaaatgcttggttgctaatactcctctcaactctccacttccttgtcatgattgaatttcctgtgcttactatatgccctgttattttccccttgcccccctatacccagaagcagcctgggagaaagtaagtagagccttgccctttagagccaggattgaacactttggttcattctctctccaccaacaacatccatgaactattgcagtggtggagatgtggaagttgagtactgagtttggatgtgcttgcttgttccaacctacctgctgatgtcacgataaatgtggccctccctagagggttaaaaaaattttagttgataactctatgtgcaattctatgagtgaatagttattttaagattggatctggtcactccaaaggccttccaaagaatggagtcagatttcgggactcaaactcttgttgctgtgggtcccagctattaatatactacattgtccaccattgaactacaaagagtgaaaaatgtcaactttctgattatcattcacttgttcttttttggtcctagttgtatgcaattgcagtcaaagatctcataagaaagactgacaggagctacaaagtaaaatcccgtaacagcactgtggaatacacccttaacaagttggagcctggcgggaaataccacatcattgtccaactggggaacatgagcaaagattccagcataaaaattaccacaggtaagcaggagagaggttagaggtcttctcacacagcctgccctcagtgctgtgccgctagacctccagagacagacttttcattaggcgtttgtttcacagggagtgcaaacgctgcccttcaatattcctacaggggcagagtagtgcagaggctccagggtctgagccgtggcgtggtggccagggcacagtgggctggggagtggctatcgttttctttattttctaagtctttttaactcccctcgctggttttgatattactaaaggaaaagaggagggatgcccaagagaggaaataaaactgaatagttgccactaagaccaagtgctgtatctgagaatctggatgacaggttctcagtggtccattgtggcaatctgacatgttgaaatggagggagacccacagctgggcagtagatcaaagggcagtcaggctcaagttcagagagctggtagtaagctccgttgctcagacagcagcaggtattattgggagttttgatattgggtaatggaggcccagccccatttatgctggtggcgtgcagtgggcctgggccatgtgccattgtcactccagtgtcctgtcttcagatggaactccttatcccatcccattccttcctcaccacccttctacccaaccccatttgtttttgtacacacttggttacaagggctattaagtactgtccaaatttcttggctaaagatgttataacaacaataaaagagatgccaataaagaatatctaccatgtgctaggttctgtactcagcaatctatgtgttttattttttctgtaacccagccctccaaggctagcattatttaatctctctttgatagacaagaaaatagagtttcaaatgtatatccactaaccgcatcccatctcatctttaattttcagtttcattatcagcacctgatgccttaaaaatcataacagaaaatgatcatgttcttctgttttggaaaagcctggctttaaaggaaaagcattttaatgaaagcagggtaagttcctccctcattctcaatgactttggaaatttaattgaaatgctgtttcagagatgagcttgttgacagcatgctggcatagatagtgtaaaaaaaaagaaagaaaaagaataggacatggacatgaacttgagaattaaaggaccattttcagtgggattgctaattagcgaaatgcttatactgcccgttaaagatgagaatctctgcactaagcacttttcaatcctgacttgtcttcccctgaagaaagacaaatgggctggaggccatgctgtgcttcccgcagaagctgcagctgggctggggctcagggtgttaaaccaggagcctattccacactcgctgagggtgggactgtggcttcagtaccaggagttgagctgcactctcagcctggcatctcagcactctcttcccagataaattacagggagcaggaggcacttgaagatactgtgctaacttatgaagaacaccttgattttgtttggttttgctattggtaggccaatatggtattcacagcaaaagacaggggaagaggagtgagacctgggagtagatttaccacccaagggtggacagattcttgagtaaagctgggttggccccagagacagcaaagcctttgctaaataggaatgtgatgaatcaactatggctacctggagatgcagcataggcaaagagccatgggttctaaatagtcaccgtgcaataccaaagcaaagtgaaattaaaattggaaaattctcaccacacactctgtgagaattctcataactcttgtaactatgacatctaaatggctaatatccttaaatagaaggaaagctttcaagtaagttcaaaatggaaatattctaattttgaagaagggacatgtaacaaagcggaaaattccagcagcagtaagcaaaaggagaaaagttcaacctcaccggtaatctaaataacaaagaggtaaccctctcatgttaaattggtaaagatttgcagggaagagtataactggtatgaatagtagttggggaagtaaacgttctgggaatatgaattggttcaaactcaagtaaggttcttgggtaatacctatcaaaaacgttgaaagtgttcacacccattgatccagcagttgtaggattttactctaaagcagcaacgtgcatgaagaatttgtgtgtagtatttatgacagcaagaaagaggaaacagccgagatgccgaacagaagaggatgggttaaataacgtatgggtggttgatgttgtgtaatctcaattattttctttataacctttgtgtattttacaaatgatcgacaccagatatctattaggtggaaggtaataactgctggcttataggaaagaatgcggggatgagattccaggcaggtattgggaatcccagttcggcagccagtcgccattaggggatccttcctgggtggctggagcccggctcttaggttaagattctaggttagtatttcgttcctagtggagggtctggcataggcatagcatgtccttcttcccttcccctgacaaggagttcaaagaattgtattagtccgtttccacagtgccaataaagacatacccaagcctgggtaatttataaaggaaggaggtttaattgactcacagttccacatggctgcggaggcctctccatcatggtggaaggcaaagaggagcaaagccacatcttacatggcggcagacaaagagagaatgagagccaagtgaaaggggaaacttcttataaaaccatcagatcttgtgagactattcactaccatgagaacagtataggggaagccgcacccatgatccagtgatctctcaccgggtccctcccacagcacaggagaattataggagctagaattcaagatgagatttgggtggggacacagccaaaccacatcaagaatagatgggtcagtggtattgggatcaagagactgtgattatgcaagggggcccaatatgtggctagagaaaagtgatggagtcttttcagggggatggtggagagtgtcagtagctttgacactggaatagttggggatcagcagagaagtcaggttgtcagccctcatcccagctagtatcctgggccagggctgtccccaggatggctttttccagcaccagagtccagggctgtaactaggaagacatttcatcctctcctccagtgaacaggggcctgagctggcttcagtgcttctgatttcaaggccaggttgttggggggctgagatcggctcagaaggagctagagagcagggagacaggaagtgagccgacaaggtcattcctacatattgttctggggacaaatgtcttgtcttttctaattgcaagttctcctttctcaccccattgctggagtccactgcgacctggatttattattagtcaaattccattatggcaaactgttcagattcttggtggcatttaatattgcttgagacaggcagactgctgagcaaatctctgagtgtggctttggtaaaatgactttcctgagggccacagttttcatttccacgatatagcttgttgtgggggggtggtgtggcagttatttgagatattggagatgagaaaaattttcattttctgaatccagtatctcagtggtaatgtaaaaagaacaaggagaaacccagggcgctttcgcgtctgtagcagcccacagtgaggagctcacataaagatggaaccagtaatagaggctgtcagtttccatattcgacttcctgagcaatctcttgtgtttgttttcagggctatgagatacacatgtttgatagtgccatgaatatcacagcttaccttgggaatactactgacaatttctttaaaatttccaacctgaagatgggtcataattacacgttcaccgtccaagcaagatgcctttttggcaaccagatctgtggggagcctgccatcctgctgtacgatgagctggggtctggtgagttgcgattgctgcccgtttctgtcttcagttctagggaaatagcaagaatgtcatatggtttcatgaccatgtgtctttctaaaacacatggaagatattctcagcttaaaagaaaatcatttatatatcagtttggtcaggtagtgatgtatttaacaaatacttcctgagctgaacatggtacaggaagctgagattacagggggaccggattctgaacataaagtgcaagaaaggcaaggctttgtttaaaaagggaaactctaggttcacaagagtttcatttgttttttgtgggacttctcagcacctctaacatgctaatatatcctgtggatctccaagccagtagatcatctccttgtcatggattttacatgtaaaatcatataactgattttacagtgcacacctctgccccgccccggcttcatcttagctctcagcataagcttaggactggaatttgtcctgggatctctgtcttatgtcttatgctgggccatgctagtgatggaagagaggacccttccgttcatacagaaagtctgcttacattatagtagtttggccaggatttcaacaaatgttttgccactggtcttttttagttccatttactctcagccaagaactaaccagtgctcaagccaaaatcttgtgttagagttgttaaatgttccgtctcatagtgtttctcagggtgagatcttgtgcaatatttatccttggcaccccccactaagagagggaaacactgcctgccacttcccttgggagaatcttaacatattagaggttctaagaaggtcctacaaaaaccagcccaactcttgttgacctagtatttcctcaacagagccccatttttaggcaaaactaattggcaacctgtgaaatatgctttgggaaaaattcctgtgcagacccctcccggccacctttatggaaccaaggttgtcaggcagaagggctcttggccaacatcttgccccttcacgttcaccttccccttggaagtggggtgggggagggagggcactccttcctggagctcccagccttcattgtgccgacttcctcttcactgctccagccgcacacacccccttcattaaccactgcacagttggaataggttggaacatattaaataagatgttgctagagtttttttttttttctggcaaggaaataatgaaagaaatgtaaatacagacacgaatattgaattgttagattaggtttgcaagaaacaattgttctctggcccatcttgatgaataccctgtcagggtgaatgcctggggagtgacagagctttctagtgaagcagagacctggcctgcgccacctctcccgacaccagggagcaaccctgagcctgttgaggctcctcatggagacctagactgagggaagtccagtctgtttcctttgccaaaaactgattcctaggtttcattttcaagttcagacttaccctgggatttttaacatgaaaagtctaccgttttcaaggagactggcccctaccccagcaggatgggacgtggggcatggctttgccctagagccctggtggtacaaatctattagtgaatcatcacagagcctgtttgtttaagtcaataggaaggggccatgtttgttaggttataaatgccgaaacggctttgcaaataactttaaaaaatgttaaatgtatatggaaagttgtttttctccctcactctctttttcacttaagtgaaaaacctcataaaacttcatgagctgttaagtctgtattgtggtgtaggaatctcgtttgtatcacttaatggagcttcaggtaattgcagttcagagtgactttggtgccaagtagggggaaataattgcaatctcgttaattagtggtctgatttcacatcctcttatgtaaggcaagcaagtggtcttaagtaataatgctaatgaaatcaatgttgataccccaacaaaggtctcccttccaagagattatctaaataaccaacaaggcagtgattaggagtctaatgtaattaccatatttgcatgcacaaggcccttggtctatcagctcatggcaagtagtggggaagcaatcaggcatcacgcacatgcagaaacgtctcacaccagacaggcagtttgtgtagctgtggctatcgcccagctttttttggtgggtggggccttgaggagtcatctggtctgttctcctgccctcaggtgggcttattggtgggaactttgccttggcaggtgcagatgcatctgcaacgcaggctgccagatctacggatgttgctgctgtggtggtgcccatcttattcctgatactgctgagcctgggggtggggtttgccatcctgtacacgaagcaccggaggctgcagagcagcttcaccgccttcgccaacagccactacagctccaggctggggtccgcaatcttctcctctggggatgacctgggtaagtggggcagggagagtcggttcttcctcccagggctgacccccacgcagccaatgacttgattaggaaacacccaccttcagctcctcttttgaccctggaggagctcttcatcagccagcgatttgattccatgagttttggttaaaccattcagagccctcactttttaacttttaagttaaattaaaatgttgtattctctttgattgtgtagttctggcctgaaacagggagcttgccccaggccttgagactcccaaagtatcggaaaatcctcaagaatatctgacccctgtctcatccttcactgagctggaggtctgacatctctggagatcctaactcaagataaaaaataatgctttcccaatcagcttctatcaaaggagaccctttccatcttgctgtttctctttctggttgctagtgtaacctcaccagccattcttttatgtaccttaacacagtggtccccaaccttttttgcaccagggaccagttttgtggaagataattcttttttcactggaccagcggtggagggggaagggttgggggatgatttcaggatgagactgttccacctcagatcagcaggcattagattctcatagggagcgctcagtctggatcccttgcacgctcagttcacgatagggtttgtgctcctgtgagaatctaatgctgccctgatctgacaggaggcgaggctcaggctgtaatgctctgactcaccactcacagcctgctgtgcggccccccattcctaacaggccatgtactggtactgatggccctcggcccgggcattggggatccctgtcttaacacatagcaagggaaaaagtaagaagtttcccgttttgaaatctttgcacaatgaaaaccctaaatgctaatagagatagtaagatagtaatataataaagtgggtgtgttacgaggcttccccaaacttagactaatcactgtgaatgtacaagtttatttctttccgttaactagttacaattatatatctatgtttataaagacatttgtatattccccttcactgatcatatgatgttagctctgttccctttccttgtcagtttcctttcttgcctaataagccggcacctggactgccttgtgtgaatggggcggcttctttgcttctgccgttggaggcaacaggagtggacccatcagcataccctgcgatagtcactgagtgtcggtccacacttggtgacacaggattataccgggcgtcacaaggggacagctgttagtctgggaagctgtcctcaaaatgcttaaactcctcccagatccttttcctcagagcactttgggttcagaagagaaagcagacactgaagttcactgtgctagtgtagggtatagataactcaaactggggaacccaaactacccacttagcttttgagtaggtaataagagtcttctcctgagaagctttgttttcctaatttggctacgttcaaacgaccactaaaataaatgtgaggatccatcgatgggtagaaggtggccaggagggacagtgggaagctgggctaggtttcacagctgattatggtggctgcctggctatggcattgaccttctcagctagagggttgtggtagggttgaggggtgggtagagtggtgggatatggggtcaggtgaaaatgtgttggaactcaccaaggcctgactgttttgtctctaggggaagatgatgaagatgcccctatgataactggattttcagatgacgtccccatggtgatagcctgaaagagctttcctcactagaaaccaaatggtgtaaatattttatttgataaagatagttgatggtttattttaaaagatgcactttgagttgcaatatgttatttttatatgggccaaaaacaaaaaacaaaaaaaaaaaaaaggaaagaaaggaatgaataaactttgtagtaatcaactgtgaacttcaaaccaggttgattttagtaacccaattgctttgatttgacattaatgtagtcttacagggctgtgcttgctgggcatgcttttacgtctgtgagataatttcggttcagtaaattggccaatctttttatttttctaagacacagaaatgtatttaataaaaacctcgagagagtgatgggtggaaccccttctccttgaaagtgtgtacagatattccattttgtttggatatagtttataggaaagtgtgtggatgtattatggcggaaggtttctttatgttattttgttaatttattgggactctgtgtaaggccaggctttagtggtcattagacaccacatgtgttatgagccccttacccatagggttgggggtgggaagagaagcatatttttttgccattccggaagcaatccatttttattcacttgtgtgtcatgtaatggtctttggcaggagagagcactgagtcattgctggagttcagttcaacagagctgcagcttgggaagccctgtaagcccacagcttcctctcttatattaattgatggaattttactgtatgtgcctctgtacaagatgtagctttgagagctacaaaatgataacactgctttattacacactggtttcattgtcattgcaaaaacttaccctggttgtgggggagagttctagatctgtgccatgatccatacactggctaatagagtacataatttttccattttccattttttgtttttacttactactgaaggatctcagatgtaaaattatgtatttggtttgagatggccacttattgtccttaaaaatccatactgatatatgcagtcattttgaattggacagtgccttctctttttttttctcctcttcttccatctccctcacccatgcccccacccaatctaaagagacagtgctgtacattctcatagagatagagaagatctaaaaagttgagactactcaatccagttaacaacagcaggagcactagagtttgttcatttattctctctgtaaaacaagctgtgctttttttcttctgcctttaaaatgccacccgtgtattcaaaccatggccacttgatacttatgtagaatccatcgtgggctgatgcaagccctttatttaggcttagtgttgtgggcaccaatgtcgagcatcgttgtgacttgtgctgtatgattctcactgaagaatttcctttcagccaagaagcagtgaggtctgggaatattccaaagtcatgtctctgaatatgtgtccttgacgtgcaagctttgtaaaaccccatccccgcttaggtgcgaggcatcaccttctcacaagtgtttagtttcttttaaccacaagtatcattcttgggtgataatatagtttcattctacttagggattgtttagaaaacaaagaaagagccaattaaattttttagtttttgaaatttttatttatatgtatacttagatgagtattttaagctgtcgacctttagtttgccatacgggtaggactgtatttcatgttaacaactggtggtaatgataagccttcttctagcgtattttctcttctttcctgtcactttcctaagtttttttttttaaagactggaattttttttggctttatcttgtcttaccgtagagatttgttcaaaactctaagccctaccacctcccctttaataagctctttaaatagttgaatcattaacaacctggtgggaggcaagtcatttaattgaaccactaggaagtgtattttcttttctttttctgccaactttttggtggcatttgtaaaagctgatataaaaggctctgagatgttattttcagttattccataggcaagcctttttacagagcatatgtctccagttggcagcttgagatatttccgagcatccggttctagctaccagtgcctcccaatgcttagtgcacagtactgtagactggccatcacccctctccttggaaaatgccactgtgctgtttgaaaaaaagcagccttttagggctagagtattttatataaacagaagagctaagttcctgaagactaagctagatagctgcagctatatgtaaattgtatatttttatgaacttttgaagcacacactcctgtttccctctgtgtagctttgtggggatttcatgtatatatgctgtctgaaagaatccagaggttggagtgccaatagaaaatgaaaacaaatgccttgtactacaggcagcctctgaaggtgaccacataactgtcttcactgtgaccaatcggagtccctgcttgcttgtgaagaaggggcttttgtaccttgttggagatgccacctcagaagttcacactgtgcaggaaaaaggttttattctctcctggcatacattagaatgtcagatgcttgcatccatgtggaccacgatgggcctctaaaaattggtgggcagggggtttgcttatgagttttctctggaaaccgattttactcctggatgtattgaatgccccttgagctttatgagatacgagtccacatggataaaatgttagagagtggagttctacagaggattccaggaagaggccatgtctgtgcagtcctagttccagacaggtgagaagctccaggaactactggctaccttgacaagctgggtaaatagttatcattctgggtaactggttgaaactctgacttttggacaagtaattcctggggttctgtctttggtagcatcaccagggatatttgggtgggacagacagaagacacacagctgcctgttctctcctgcccatcatgtttggcccactagatgaagctgtactcagcaatttagggaatgtaacccttctcagaactggccattttcaggggaagcttgggagagcaatagtatggtgagccccttagagatgagcgcctactccttcttggcgaatgctgccttcagatgcttaccaagtggtcactgcatctagtaagattatatttccagtacacttccttagggcagaaacaccatcctatcaggtttggtcagtcccttcttcatgaagggagtcatggggaattcctgaaaattttcttccttctgcagacagttggatgagtcccttagagaaggcatccagagacataactaaactgaatatcatcccatattgattttaggaattgactctaaaactctgtgcagaatcttgtgttgggattgtatcttgacattcctgttgtgttatttttcttaactggagtgtgtgctgcctttcaggtacaatttttgtgtaataaaagccagtgcattaagtttatatagactactttctatgcaagactgagatatggaatagataggaagagatatgtactgctgggtacatggacagtaagtgtgttttcagatggagtaccagcaccgaaaatgggttgagggaggatgggttgtatgtatgtttctgcccactaattttgagcagccatattatgaattaaatcgtcacagccaagtaataacccaagaatggtatgagtttcatgtgtaatagctcaaatggaataagcatgaatgctggagtggaccattatcctcaaatattctatgtcacttctcatttaaagactcttgttatgaactattagaaactttaggcaaaatcaaaagtatttgcggcaaaataaaggcctattctactcttatttaaagtgaaacactgtatacttgtttctctccaaagcgaaattaagtatttataatttcaattgcctcgataagtttccaagtcactgaaatctgctgaaggttttactgtattgttgcacaactttaagataatttttgtctcaatgtcaacttttttcactgaataaaaatttaactgggtcaagaaaacacctctttgaaaatccactgtctctgtgtgtctcgagctgttctttagagcgcaataaagatggctgacgcagtctccaaaccccatttgattggtctgttttaaacggatgtttatttcatagatgagagaacaccaaggcctggaataattttgttattaacaagctggtctcagatggtggatccttgaagaacacgatgtctttgtgttggttgaggagggggaagatgtgctggctgttttgaagtaaacagaattattccgtagggacaatgactaaagtggctcccttaaatttgtaactacatttgctaagagacagtttgctaagaaggcaattttcaaatctaagagacggaagcacagcagtatagatgagctgtgtgtctaagagcacttctatgggtttccatagacagtcttgtgaggagtgctgcgtgtacctattatgggcagctgaatggccatgggcctgtaagtcaggattggaggctgtggaactgggtgggggagggaggcaggtttttaagaatttaacaggtcttctggtatgctgcttttgtttagacactgagccagagccaaaccctgaagtattatcatctggttttgtgaatgaagaaaaggaggcatagaaaagtgaagtaatttaggagaaaccagagcataaaaggcaaaaccagcctcccatcccaggtgtttctgatcccagatcctcttctgaatcacgacgccacagcgcctcatgtcaccattcagtatcacaaagaacacattagtccaacacattgcaccaagcgaaatcccaaggggagacctaccacctgggtgagcctccttggtcatggcctcatccttaggttttcaggcttagataatttttgtcaacacatgatagtgaattcatctctcatggccaaacacaccttaaccaaactcaggatgttgatatgcaacgtcataatgtccatttgttaattcaccctgggaaagtgtcctgtcccttacaatgtctgcatgaccagtgcattctctccctgtagggagatctaccccaggagccagtcaccaccagaaggttgcttggagagcaggggcaaagagttttaaaagtaggagggatctgggttagcatagtggttgcccaataaatactgaatgaatgaacaaagacttgacactccacaacaggaataatctactccatataaacttagtatttgaagccgtcagattgcaacaccctggatccatttctagttaaaaagatcttgccaataggatctaatactttaagtccatgcactgtggttcccctggacagggcttgggcactcccacatcggtcactctgactcatctctacatgtcctgttgttgagtaaactctcccactcacgaaaacattctatagcaaaattaatgcatttggactgagtttgaatcgaatcttcctggctaagagccagattctgactacatccgtcagctatgattattgggttccccagcccatagcaaattgaacatgggttggggctgctaagggcagctactccgaggacaatagaagagaagccacgagttagagttagactgctggaaaacctatgtgagagataaaggaactccagcaaatatacttattgggaatatttggcataaaaccagagtcctacacagtaagtagcccatccaattagaataattatcattcccttccgttgaacccctgttctttggtagtaactatgctaaactctctctctctctctatatatatataaaaaacaacatcttttttcttttataggaaagattatatatcttgttatagatataaaaacatcttttttcttttaaaggaaagattaatacctaaatcacagaagcgcttttagaattaaaatattaaatgtattaaatatatttttatatatttatataatctatgaatataaataaatatatatatacatattttaattctaaaagtgcttctgtgatttaggatttaggtattaatctttcctttaaaagaaacaagatgttgctttaaaagaagagtaacttctccaaggt

SEQ ID NO: 3 - DNA, 640 bp, Epstein Barr virus
  modified_base (1)..(640): A nucleotide ribose may be modified with 2'-O-methyl
  modified_base (1)..(640): A nucleotide ribose may be modified with 2'-O-Methoxyethyl
  modified_base (1)..(640): A nucleotide ribose may be modified with 2'-fluorine
  modified_base (1)..(640): A nucleotide ribose may be modified with 2'-fluoroarabinonucleic acid
  modified_base (1)..(640): A nucleotide may contain a methylene bridge between the 2'-O and 4'-C positions of the ribose
  modified_base (1)..(640): A phosphodiester linkage may be replaced with a non-ionic phosphorothioate linkage
  modified_base (1)..(640): A phosphodiester linkage may be replaced with a non-ionic amide linkage
gtgcacgttagttacatatgtatacatgtgccatgctagtgtgctgcacccactaactcgtcatctaacattaggtatatctcccagtgctatccctcccccctccccccaccccacaacagtccccagagtgtgatattccccttcctgtgtccatgtgatctcattgttcagttcccacctatgagtgagaatatgtggtgtttggttttttgttcttgcgatagtttactgagaatgatgatttccaatttcatccatgtccctacaaaggacatgaactcatcattttttatggctgcatagtattccatggtgtatatgtgccacattttcttaatccagtctatcattgttggacatttgggttggttccaagtctttgctattgtgaataatgccgcaataaacatacgtgtgcatgtgtctttatagcagcatgatttatagtcctttgggtatatacccagtaatgggatggctgggtcaaatggtatttccagttccagatccctgaggaatcgccacactgacttccacaatggttgaactagtttacagtcccaccaacagtgtaaaagtgttcctatttctccacctcctctccagcacctgttgtttcctgactttttaatgattg

SEQ ID NO: 4 - DNA, 241 bp, Epstein Barr virus
  modified_base (1)..(241): A nucleotide ribose may be modified with 2'-O-Methoxyethyl
  modified_base (1)..(241): A nucleotide ribose may be modified with 2'-O-methyl
  modified_base (1)..(241): A nucleotide ribose may be modified with 2'-fluorine
  modified_base (1)..(241): A nucleotide ribose may be modified with 2'-fluoroarabinonucleic acid
  modified_base (1)..(241): A nucleotide may contain a methylene bridge between the 2'-O and 4'-C positions of the ribose
  modified_base (1)..(241): A phosphodiester linkage may be replaced with a non-ionic phosphorothioate linkage
  modified_base (1)..(241): A phosphodiester linkage may be replaced with a non-ionic amide linkage
  ref <308>: DATABASE ACCESSION NUMBER: genbank/MH590571.1
  ref <309>: DATABASE ENTRY DATE: 2019-01-18
  ref <313>: RELEVANT RESIDUES IN SEQ ID NO: (36456)..(36696)
gccgcaataaacatacgtgtgcatgtgtctttatagcagcatgatttatagtcctttgggtatatacccagtaatgggatggctgggtcaaatggtatttccagttccagatccctgaggaatcgccacactgacttccacaatggttgaactagtttacagtcccaccaacagtgtaaaagtgttcctatttctccacctcctctccagcacctgttgtttcctgactttttaatgattg

SEQ ID NO: 5 - DNA, 147 bp, Epstein Bar virus
  modified_base (1)..(147): A nucleotide ribose may be modified with 2'-O-Methoxyethyl
  modified_base (1)..(147): A nucleotide ribose may be modified with 2'-O-methyl
  modified_base (1)..(147): A nucleotide ribose may be modified with 2'-fluorine
  modified_base (1)..(147): A nucleotide ribose may be modified with 2'-fluoroarabinonucleic acid
  modified_base (1)..(147): A nucleotide may contain a methylene bridge between the 2'-O and 4'-C positions of the ribose
  modified_base (1)..(147): A phosphodiester linkage may be replaced with a non-ionic phosphorothioate linkage
  modified_base (1)..(147): A phosphodiester linkage may be replaced with a non-ionic amide linkage
  ref <308>: DATABASE ACCESSION NUMBER: genbank/AH002364.2
  ref <309>: DATABASE ENTRY DATE: 2016-08-25
  ref <313>: RELEVANT RESIDUES IN SEQ ID NO: (412)..(558)
cctgtagtcccagctactcaggaggctgaggcaggagaatcacttgaacccaggaggcggcctgtagtcccagctactcaggaggctgaggcaggagaatcacttgaacccaggaggcggcatctcaaaaaaaaaaaaaaaaaaaaa

SEQ ID NO: 6 - DNA, 76 bp, Epstein Bar virus
  modified_base (1)..(76): A nucleotide ribose may be modified with 2'-O-methoxyethyl
  modified_base (1)..(76): A nucleotide ribose may be modified with 2'-O-methyl
  modified_base (1)..(76): A nucleotide ribose may be modified with 2'-fluorine
  modified_base (1)..(76): A nucleotide ribose may be modified with 2'-fluoroarabinonucleic acid
  modified_base (1)..(76): A nucleotide may contain a methylene bridge between the 2'-O and 4'-C positions of the ribose
  modified_base (1)..(76): A phosphodiester linkage may be replaced with a non-ionic phosphorothioate linkage
  modified_base (1)..(76): A phosphodiester linkage may be replaced with a non-ionic amide linkage
  ref <308>: DATABASE ACCESSION NUMBER: genbank/MH590499.1
  ref <309>: DATABASE ENTRY DATE: 2018-01-18
  ref <313>: RELEVANT RESIDUES IN SEQ ID NO: (37475)..(37550)
aataggccaggcgcggtggctcacacctgtaatcccagcactttgggaggccaaggcgggtggatcacctgaggtc

SEQ ID NO: 7 - DNA, 48 bp, Herpes simplex virus 2
  modified_base (1)..(48): A nucleotide may be modified with 2'-O-methyl
  modified_base (1)..(48): A nucleotide may be modified with 2'-O-Methoxyethyl
  modified_base (1)..(48): A nucleotide may be modified with 2'-fluorine at 2'-ribose (OH)
  modified_base (1)..(48): A nucleotide may be modified with 2'-fluoroarabinonucleic acid
  modified_base (1)..(48): A nucleotide may contain a methylene bridge between the 2'-O and 4'-C positions of the ribose
  modified_base (1)..(48): A phosphodiester linkage may be replaced with a non-ionic phosphorothioate linkage
  modified_base (1)..(48): A phosphodiester linkage may be replaced with a non-ionic amide linkage
  ref <308>: DATABASE ACCESSION NUMBER: genbank/MH790658.1
  ref <309>: DATABASE ENTRY DATE: 2019-03-16
  ref <313>: RELEVANT RESIDUES IN SEQ ID NO: (11357)..(11404)
acattaggtatatctcccagtgctatccctcccccctccccccacccc

SEQ ID NO: 8 - DNA, 76 bp, Epstein Barr virus
  modified_base (1)..(76): A nucleotide may be modified with 2'-O-methyl
  modified_base (1)..(76): A nucleotide may be modified with 2'-O-Methoxyethyl
  modified_base (1)..(76): A nucleotide may be modified with 2'-fluorine at 2'-ribose (OH)
  modified_base (1)..(76): A nucleotide may be modified with 2'-fluoroarabinonucleic acid
  modified_base (1)..(76): A nucleotide may contain a methylene bridge between the 2'-O and 4'-C positions of the ribose
  modified_base (1)..(76): A phosphodiester linkage may be replaced with a non-ionic phosphorothioate linkage
  modified_base (1)..(76): A phosphodiester linkage may be replaced with a non-ionic amide linkage
  ref <308>: DATABASE ACCESSION NUMBER: genbank/MH590442.1
  ref <309>: DATABASE ENTRY DATE: 2019-01-18
  ref <313>: RELEVANT RESIDUES IN SEQ ID NO: (95948)..(96023)
gcactccagcctgggcaacagagtgagaccctaactctaaagaaatgaagaagaagaaaagaagaagaagaagaag

SEQ ID NO: 9 - DNA, 249 bp, Epstein Barr virus
  modified_base (1)..(249): A nucleotide may be modified with 2'-O-methyl
  modified_base (1)..(249): A nucleotide may be modified with 2'-O-Methoxyethyl
  modified_base (1)..(249): A nucleotide may be modified with 2'-fluorine at 2'-ribose (OH)
  modified_base (1)..(249): A nucleotide may be modified with 2'-fluoroarabinonucleic acid
  modified_base (1)..(249): A nucleotide may contain a methylene bridge between the 2'-O and 4'-C positions of the ribose
  modified_base (1)..(249): A phosphodiester linkage may be replaced with a non-ionic phosphorothioate linkage
  modified_base (1)..(249): A phosphodiester linkage may be replaced with a non-ionic amide linkage
  ref <308>: DATABASE ACCESSION NUMBER: genbank/MH590376.1
  ref <309>: DATABASE ENTRY DATE: 2019-01-18
  ref <313>: RELEVANT RESIDUES IN SEQ ID NO: (36674)..(36922)
aattttgttgatcttttcaaaaaaccagctcctggattcattaattttttgaagggttttttgtgtctctatttccttcagttctgctctgatctttagttatttcttgccttctgctagcttttgaatgtgtttgctcttgcttttctatgttcttttaattgtgatagttagggtgtcaattttagatctttcctgctttctcttgtgggcatttagtgctataaatttccctctacacactgcttt

SEQ ID NO: 10 - DNA, 35 bp, Epstein Barr virus
  modified_base (1)..(35): A nucleotide may be modified with 2'-O-methyl
  modified_base (1)..(35): A nucleotide may be modified with 2'-O-Methoxyethyl
  modified_base (1)..(35): A nucleotide may be modified with 2'-fluorine at 2'-ribose (OH)
  modified_base (1)..(35): A nucleotide may be modified with 2'-fluoroarabinonucleic acid
  modified_base (1)..(35): A nucleotide may contain a methylene bridge between the 2'-O and 4'-C positions of the ribose
  modified_base (1)..(35): A phosphodiester linkage may be replaced with a non-ionic phosphorothioate linkage
  modified_base (1)..(35): A phosphodiester linkage may be replaced with a non-ionic amide linkage
  ref <308>: DATABASE ACCESSION NUMBER: genBank/KP968264.1
  ref <309>: DATABASE ENTRY DATE: 2016-02-01
  ref <313>: RELEVANT RESIDUES IN SEQ ID NO: (159585)..(159619)
ctgcactccagcctgggcaacagagcgagaccctg

SEQ ID NO: 11 - DNA, 31 bp, Epstein Barr virus
  modified_base (1)..(31): A nucleotide may be modified with 2'-O-methyl
  modified_base (1)..(31): A nucleotide may be modified with 2'-O-Methoxyethyl
  modified_base (1)..(31): A nucleotide may be modified with 2'-fluorine at 2'-ribose (OH)
  modified_base (1)..(31): A nucleotide may be modified with 2'-fluoroarabinonucleic acid
  modified_base (1)..(31): A nucleotide may contain a methylene bridge between the 2'-O and 4'-C positions of the ribose
  modified_base (1)..(31): A phosphodiester linkage may be replaced with a non-ionic phosphorothioate linkage
  modified_base (1)..(31): A phosphodiester linkage may be replaced with a non-ionic amide linkage
  ref <308>: DATABASE ACCESSION NUMBER: genbank/KR063344.1
  ref <309>: DATABASE ENTRY DATE: 2015-12-06
  ref <313>: RELEVANT RESIDUES IN SEQ ID NO: (159601)..(159630)
gtctcgctctgttgcccaggctggactgcag

SEQ ID NO: 12 - DNA, 34 bp, Epstein Barr virus
  modified_base (1)..(34): A nucleotide may be modified with 2'-O-methyl
  modified_base (1)..(34): A nucleotide may be modified with 2'-O-Methoxyethyl
  modified_base (1)..(34): A nucleotide may be modified with 2'-fluorine at 2'-ribose (OH)
  modified_base (1)..(34): A nucleotide may be modified with 2'-fluoroarabinonucleic acid
  modified_base (1)..(34): A nucleotide may contain a methylene bridge between the 2'-O and 4'-C positions of the ribose
  modified_base (1)..(34): The phosphodiester linkage may be replaced with a non-ionic phosphorothioate linkage
  modified_base (1)..(34): A phosphodiester linkage may be replaced with a non-ionic amide linkage
ggctaatttttttgtatttttagtagagatgggg

SEQ ID NO: 13 - DNA, 34 bp, Epstein Barr virus
  modified_base (1)..(34): A nucleotide may be modified with 2'-O-methyl
  modified_base (1)..(34): A nucleotide may be modified with 2'-O-Methoxyethyl
  modified_base (1)..(34): A nucleotide may be modified with 2'-fluorine at 2'-ribose (OH)
  modified_base (1)..(34): A nucleotide may be modified with 2'-fluoroarabinonucleic acid
  modified_base (1)..(34): A nucleotide may contain a methylene bridge between the 2'-O and 4'-C positions of the ribose
  modified_base (1)..(34): A phosphodiester linkage may be replaced with a non-ionic phosphorothioate linkage
  modified_base (1)..(34): A phosphodiester linkage may be replaced with a non-ionic amide linkage
  misc_feature (20)..(20): n is a, c, g, t or u
  ref <308>: DATABASE ACCESSION NUMBER: genbank/MH590464.1
  ref <309>: DATABASE ENTRY DATE: 2019-01-18
  ref <313>: RELEVANT RESIDUES IN SEQ ID NO: (36494)..(36527)
ttctcctgcctcagcctccngagtagctgggatt

SEQ ID NO: 14 - DNA, 31 bp, Epstein Barr virus
  modified_base (1)..(31): A nucleotide may be modified with 2'-O-methyl
  modified_base (1)..(31): A nucleotide may be modified with 2'-O-Methoxyethyl
  modified_base (1)..(31): A nucleotide may be modified with 2'-fluorine at 2'-ribose (OH)
  modified_base (1)..(31): A nucleotide may be modified with 2'-fluoroarabinonucleic acid
  modified_base (1)..(31): A nucleotide may contain a methylene bridge between the 2'-O and 4'-C positions of the ribose
  modified_base (1)..(31): A phosphodiester linkage may be replaced with a non-ionic phosphorothioate linkage
  modified_base (1)..(31): A phosphodiester linkage may be replaced with a non-ionic amide linkage
  ref <308>: DATABASE ACCESSION NUMBER: genbank/MH590396.1
  ref <309>: DATABASE ENTRY DATE: 2019-01-18
  ref <313>: RELEVANT RESIDUES IN SEQ ID NO: (27439)..(27469)
ccatcttggctcactgcaacctccacctccc

SEQ ID NO: 15 - DNA, 307 bp, Epstein Barr virus
  modified_base (1)..(307): A nucleotide ribose may be modified with 2'-O-methyl
  modified_base (1)..(307): A nucleotide ribose may be modified with 2'-O-Methoxyethyl
  modified_base (1)..(307): A nucleotide ribose may be modified with 2'-fluorine
  modified_base (1)..(307): A nucleotide ribose may be modified with 2'-fluoroarabinonucleic acid
  modified_base (1)..(307): A nucleotide may contain a methylene bridge between the 2'-O and 4'-C positions of the ribose
  modified_base (1)..(307): A phosphodiester linkage may be replaced with a non-ionic phosphorothioate linkage
  modified_base (1)..(307): A phosphodiester linkage may be replaced with a non-ionic amide linkage
  misc_feature (62)..(62): n is a, c, g, or t
  misc_feature (98)..(98): n is a, c, g, or t
  ref <308>: DATABASE ACCESSION NUMBER: genbank/MH590409.1
  ref <309>: DATABASE ENTRY DATE: 2018-01-18
  ref <313>: RELEVANT RESIDUES IN SEQ ID NO: (158638)..(158944)
caggttagttacatatgtatacatgtgccatggtggtgtgctgcacccattaactcgtcatntaggttttaactccgcatgcattaggtatatctccnaatgctatccctcccccctccccccaccccacgacagtccccagagtgtgatgttccccttcctgtgtccatgtgttctcattgttcaattcccacctatgagtgagaacatgcggtgtttggttttttgttcttgcgatagtttgctgagaatgatggtttccagcttcatccatgtccctacaaaggacatgaactcatcatttttt

SEQ ID NO: 16 - DNA, 256 bp, Epstein Barr virus
  modified_base (1)..(256): A nucleotide ribose may be modified with 2'-O-methyl
  modified_base (1)..(256): A nucleotide ribose may be modified with 2'-O-Methoxyethyl
  modified_base (1)..(256): A nucleotide ribose may be modified with 2'-fluorine
  modified_base (1)..(256): A nucleotide ribose may be modified with 2'-fluoroarabinonucleic acid
  modified_base (1)..(256): A nucleotide may contain a methylene bridge between the 2'-O and 4'-C positions of the ribose
  modified_base (1)..(256): A phosphodiester linkage may be replaced with a non-ionic phosphorothioate linkage
  modified_base (1)..(256): A phosphodiester linkage may be replaced with a non-ionic amide linkage
  ref <308>: DATABASE ACCESSION NUMBER: genbank/MH590376.1
  ref <309>: DATABASE ENTRY DATE: 2019-01-18
  ref <313>: RELEVANT RESIDUES IN SEQ ID NO: (36670)..(36925)
tatcaattttgttgatcttttcaaaaaaccagctcctggattcattgatttttttgaagggttttttgtgtctctatttccttcagttctgctctgattttagttatttcttgccttctgctagcttttgaatgtgtttgctcttgcttttctagttcttttaattgtgatgttagggtgtcaattttggatctttcctgctttctcttgtgggcatttagtgctataaatttccctctacacactgctttgaatg

SEQ ID NO: 17 - DNA, 64 bp, Epstein Barr virus
  modified_base (1)..(64): A nucleotide ribose may be modified with 2'-O-methyl
  modified_base (1)..(64): A nucleotide ribose may be modified with 2'-fluorine
  modified_base (1)..(64): A nucleotide ribose may be modified with 2'-fluoroarabinonucleic acid
  modified_base (1)..(64): A nucleotide ribose may be modified with 2'-O-methoxyethyl
  modified_base (1)..(64): A nucleotide may contain a methylene bridge between the 2'-O and 4'-C positions of the ribose
  modified_base (1)..(64): A phosphodiester linkage may be replaced with a non-ionic phosphorothioate linkage
  modified_base (1)..(64): A phosphodiester linkage may be replaced with a non-ionic amide linkage
  ref <308>: DATABASE ACCESSION NUMBER: genbank/MH590499.1
  ref <309>: DATABASE ENTRY DATE: 2019-01-18
  ref <313>: RELEVANT RESIDUES IN SEQ ID NO: (37463)..(37526)
gcggtggctcacacctgtaatcccagcactttgggaggctgaggcaggtggatcacttgaggtc

SEQ ID NO: 18 - DNA, 29 bp, Epstein Barr virus
  modified_base (1)..(29): A nucleotide ribose may be modified with 2'-O-methyl
  modified_base (1)..(29): A nucleotide ribose may be modified with 2'-O-methoxyethyl
  modified_base (1)..(29): A nucleotide ribose may be modified with 2'-fluorine
  modified_base (1)..(29): A nucleotide ribose may be modified with 2'-fluoroarabinonucleic acid
  modified_base (1)..(29): A nucleotide may contain a methylene bridge between the 2'-O and 4'-C positions of the ribose
  modified_base (1)..(29): A phosphodiester linkage may be replaced with a non-ionic phosphorothioate linkage
  modified_base (1)..(29): A phosphodiester linkage may be replaced with a non-ionic amide linkage
  ref <308>: DATABASE ACCESSION NUMBER: genbank/MH590442.1
  ref <309>: DATABASE ENTRY DATE: 2019-01-18
  ref <313>: RELEVANT RESIDUES IN SEQ ID NO: (96041)..(96069)
gtctcactctgttgcccaggctggagtgc

SEQ ID NO: 19 - DNA, 50 bp, Herpes Simplex virus 2
  modified_base (1)..(50): A nucleotide ribose may be modified with 2'-O-methyl
  modified_base (1)..(50): A nucleotide ribose may be modified with 2'-O-methoxyethyl
  modified_base (1)..(50): A nucleotide ribose may be modified with 2'-fluorine
  modified_base (1)..(50): A nucleotide ribose may be modified with 2'-fluoroarabinonucleic acid
  modified_base (1)..(50): A nucleotide may contain a methylene bridge between the 2'-O and 4'-C positions of the ribose
  modified_base (1)..(50): A phosphodiester linkage may be replaced with a non-ionic phosphorothioate linkage
  modified_base (1)..(50): A phosphodiester linkage may be replaced with a non-ionic amide linkage
  ref <308>: DATABASE ACCESSION NUMBER: genbank/MH790658.1
  ref <309>: DATABASE ENTRY DATE: 2019-03-06
  ref <313>: RELEVANT RESIDUES IN SEQ ID NO: (11358)..(11407)
cattaggtatatctcctaatgctatccctccccccccccccccccccccc

SEQ ID NO: 20 - DNA, 56 bp, Epstein Barr virus
  modified_base (1)..(56): A nucleotide ribose may be modified with 2'-O-methyl
  modified_base (1)..(56): A nucleotide ribose may be modified with 2'-O-methoxyethyl
  modified_base (1)..(56): A nucleotide ribose may be modified with 2'-fluorine
  modified_base (1)..(56): A nucleotide ribose may be modified with 2'-fluoroarabinonucleic acid
  modified_base (1)..(56): A nucleotide may contain a methylene bridge between the 2'-O and 4'-C positions of the ribose
  modified_base (1)..(56): A phosphodiester linkage may be replaced with a non-ionic phosphorothioate linkage
  modified_base (1)..(56): A phosphodiester linkage may be replaced with a non-ionic amide linkage
  ref <308>: DATABASE ACCESSION NUMBER: genbank/KY315533.2
  ref <309>: DATABASE ENTRY DATE: 2019-10-31
  ref <313>: RELEVANT RESIDUES IN SEQ ID NO: (82980)..(83035)
ttgttttaagccaatctgtttgtgatactttgttgtggcagctctaggaaactgat

SEQ ID NO: 21 - DNA, 34 bp, Epstein Barr virus
  modified_base (1)..(34): A nucleotide ribose may be modified with 2'-O-methyl
  modified_base (1)..(34): A nucleotide ribose may be modified with 2'-O-methoxyethyl
  modified_base (1)..(34): A nucleotide ribose may be modified with 2'-fluorine
  modified_base (1)..(34): A nucleotide ribose may be modified with 2'-fluoroarabinonucleic acid
  modified_base (1)..(34): A nucleotide may contain a methylene bridge between the 2'-O and 4'-C positions of the ribose
  modified_base (1)..(34): A phosphodiester linkage may be replaced with a non-ionic phosphorothioate linkage
  modified_base (1)..(34): A phosphodiester linkage may be replaced with a non-ionic amide linkage
  ref <308>: DATABASE ACCESSION NUMBER: genbank/MH590510.1
  ref <309>: DATABASE ENTRY DATE: 2019-01-18
  ref <313>: RELEVANT RESIDUES IN SEQ ID NO: (96546)..(96579)
aatcccagctactcaggaggctgaggcaggagaa

SEQ ID NO: 22 - DNA, 33 bp, Epstein Barr virus
  modified_base (1)..(33): A nucleotide ribose may be modified with 2'-O-methyl
  modified_base (1)..(33): A nucleotide ribose may be modified with 2'-O-methoxyethyl
  modified_base (1)..(33): A nucleotide ribose may be modified with 2'-fluorine
  modified_base (1)..(33): A nucleotide ribose may be modified with 2'-fluoroarabinonucleic acid
  modified_base (1)..(33): A nucleotide may contain a methylene bridge between the 2'-O and 4'-C positions of the ribose
  modified_base (1)..(33): A phosphodiester linkage may be replaced with a non-ionic phosphorothioate linkage
  modified_base (1)..(33): A phosphodiester linkage may be replaced with a non-ionic amide linkage
  ref <308>: DATABASE ACCESSION NUMBER: genbank/MH590464.1
  ref <309>: DATABASE ENTRY DATE: 2019-01-18
  ref <313>: RELEVANT RESIDUES IN SEQ ID NO: (36461)..(36493)
ccccatctctactaaaaatacaaaaaaattagc

SEQ ID NO: 23 - DNA, 29 bp, Epstein Barr virus
  modified_base (1)..(29): A nucleotide ribose may be modified with 2'-O-methyl
  modified_base (1)..(29): A nucleotide ribose may be modified with 2'-O-methoxyethyl
  modified_base (1)..(29): A nucleotide ribose may be modified with 2'-fluorine
  modified_base (1)..(29): A nucleotide ribose may be modified with 2'-fluoroarabinonucleic acid
  modified_base (1)..(29): A nucleotide may contain a methylene bridge between the 2'-O and 4'-C positions of the ribose
  modified_base (1)..(29): A phosphodiester linkage may be replaced with a non-ionic phosphorothioate linkage
  modified_base (1)..(29): A phosphodiester linkage may be replaced with a non-ionic amide linkage
  ref <308>: DATABASE ACCESSION NUMBER: genbank/MH590396.1
  ref <309>: DATABASE ENTRY DATE: 2019-01-18
  ref <313>: RELEVANT RESIDUES IN SEQ ID NO: (27469)..(27497)
gggaggtggaggttgcagtgagccaagat

SEQ ID NO: 24 - DNA, 21 bp, Epstein Barr virus
  modified_base (1)..(21): A nucleotide ribose may be modified with 2'-O-methyl
  modified_base (1)..(21): A nucleotide ribose may be modified with 2'-O-methoxyethyl
  modified_base (1)..(21): A nucleotide ribose may be modified with 2'-fluorine
  modified_base (1)..(21): A nucleotide ribose may be modified with 2'-fluoroarabinonucleic acid
  modified_base (1)..(21): A nucleotide may contain a methylene bridge between the 2'-O and 4'-C positions of the ribose
  modified_base (1)..(21): A phosphodiester linkage may be replaced with a non-ionic amide linkage
  modified_base (1)..(21): A phosphodiester linkage may be replaced with a non-ionic phosphorothioate linkage
  ref <308>: DATABASE ACCESSION NUMBER: genbank/AJ507799.2
  ref <309>: DATABASE ENTRY DATE: 2016-07-26
  ref <313>: RELEVANT RESIDUES IN SEQ ID NO: (13951)..(13971)
aggccaggagaggcagcccca

SEQ ID NO: 25 - DNA, 1920 bp, Epstein Barr virus
  EBV A73 intron antisense to SORL1 (1)..(1920): relevant sequence 159551-159585
  ref <308>: DATABASE ACCESSION NUMBER: genbank/KP968264.1
  ref <309>: DATABASE ENTRY DATE: 2016-02-16
  ref <313>: RELEVANT RESIDUES IN SEQ ID NO: (158641)..(160560)
cgtgtgattctcccgcgtgccaaacgagggacactggatgtccgaggagaagcggaacaggtcgccgtggctggagagctcgcagactcggaaaggaaagctggtttgctgacgcgtggcggtaggctgcaccgtggtggcggggggtgcgggctgctctggggtctgcgcaccgaggcggcacgccagggcggctagcagcacgaccacgcttagcaccctacgccgagtcatctctcatttggaggtgcaggtagagaagggcatatagatccttaaatacccaccccctgcccttatacagaagaattaggggccggtcagagtcgtacgtgaggtaaagcccatccgggggcagggcctggccggggctgaccgcgtccgcccggcgcaggatcaaggaccgcccccaggtcttgttgtagagggacacggttaggacggcctcgcgcagcgcccggcacagaatttgctggctagatgccagtgagcccccgggtacgctgtagaagctgttgaaggaggtctctatccagtcgctcggctcgatgcctggccatatcagggaagtcaggaacgccttctggtgaggcagcgtacctgcggcgtcacagcagcgagccagggccacgttgctgggtgggggaaagagcccgctctcctccgccaggggccccgtgatgaaggtgtacaggctgtgcgtcagcgcgtgcaggtgctccgagctcagggtctgggtaaacaggtgtgttttgatgtacttggaattctcaaaggcggcaccctcgccggcgcgcctgtcctcccagggacccgagacgaaggcccgtctgtagaggaagtggttgcgcatgcgggccagctcccagtagaccacgtccccccagacgcgcaggcacagggtctcggtcaaggtctcgctctgttgcccaggctggagtgcagcttggccagaccctcggtggccacctggcgcaggtactgctccttgcgcttgagcgcgtccgagagggcgccggacgggccgggctctcgtgccccagccggccggggcacctccgggctctcccgggacgcctcctcctcgcctcggcccaaccgctgcatggctcggttgagccgcgtgtagagctcgttcctcttttgcaggatggcccggtactgggggtgcgccgtgaaggcggcggcgcagtccgccttcagcgcctccaccgcgtcgcccgaggagctgtagaccccgccgcagaagagccgctctgtggccccgggagccacggcatcaaacaggtgagtcagccttgcccccgccagcgcctcctcgcaggcccgccgcaccagggccaggcgacgctcccgggcaaacagggcagagaggcgggaatggccgccaccctccccctgccccgttgcaccgatagcatggccgccagagttccaatagaggagctccgagagttccgccacctccgggggcactgtcgagaagacgttgtaggtgtccagcgctctggtcgccccctctgcctccggccgccccgggcccgggaccgcgccctcctctgggccgcccggcctcgccttctcctcagcctccaacaggtgcccgagcccagcctgccggacttcattctcaaacagtcccgagaccggctccggattcaccggcaccgccaggtggttacaggagacgtgggtcccctctgccgtggaagggttgccgtggttgggcagaaccatcagctcgcccacacagcgccagcagggcacagaggtgatgtagaggcgcgggtctgggatgggacttacgccccgaaagcggcccagcagatccagggcccgttccaggctctccagccccatggtgtgagacatgcaataaaacacgctattgattctcttcattaaaatctctatgtcatt

SEQ ID NO: 26 - protein, 13 aa, Human immunodeficiency virus
  ref <301>: AUTHORS: Astriab-Fisher, Anna; Sergueev, Dimitri; Fisher, Michael; Shaw, Barbara Ramsay; Juliano, R. L.
  ref <302>: TITLE: Conjugates of antisense oligonucleotides with the Tat and antennapedia cell-penetrating peptides
  ref <303>: JOURNAL: Pharmaceutical Research
  ref <304>: VOLUME: 19
  ref <305>: ISSUE: 6
  ref <306>: PAGES: 744-754
  ref <307>: DATE: 2002-06-01
  ref <313>: RELEVANT RESIDUES IN SEQ ID NO: (1)..(13)
GRKKRRQRRRPPQ

SEQ ID NO: 27 - DNA, 21 bp, Epstein Barr virus
  modified_base (1)..(21): A nucleotide ribose may be modified with 2'-O-methyl
  modified_base (1)..(21): A nucleotide ribose may be modified with 2'-O-methoxyethyl
  modified_base (1)..(21): A nucleotide ribose may be modified with 2'-fluorine
  modified_base (1)..(21): A nucleotide ribose may be modified with 2'-fluoroarabinonucleic acid
  modified_base (1)..(21): A nucleotide may contain a methylene bridge between the 2'-O and 4'-C positions of the ribose
  modified_base (1)..(21): A phosphodiester linkage may be replaced with a non-ionic phosphorothioate linkage
  modified_base (1)..(21): A phosphodiester linkage may be replaced with a non-ionic amide linkage
  ref <308>: DATABASE ACCESSION NUMBER: genbank/ KP195701
  ref <309>: DATABASE ENTRY DATE: 2015-04-04
  ref <313>: RELEVANT RESIDUES IN SEQ ID NO: (147)..(167)
agcuggugguccgcauguuuu

SEQ ID NO: 28 - DNA, 20 bp, Epstein Barr virus
  modified_base (1)..(20): A nucleotide ribose may be modified with 2'-O-methyl
  modified_base (1)..(20): A nucleotide ribose may be modified with 2'-O-methoxyethyl
  modified_base (1)..(20): A nucleotide ribose may be modified with 2'-fluorine
  modified_base (1)..(20): A nucleotide ribose may be modified with 2'-fluoroarabinonucleic acid
  modified_base (1)..(20): A nucleotide may contain a methylene bridge between the 2'-O and 4'-C positions of the ribose
  modified_base (1)..(20): A phosphodiester linkage may be replaced with a non-ionic phosphorothioate linkage
  modified_base (1)..(20): A phosphodiester linkage may be replaced with a non-ionic amide linkage
  ref <308>: DATABASE ACCESSION NUMBER: genbank/KP195701.1
  ref <309>: DATABASE ENTRY DATE: 2015-04-04
  ref <313>: RELEVANT RESIDUES IN SEQ ID NO: (127)..(146)
gccgucuucggucaaguacc

SEQ ID NO: 29 - DNA, 25 bp, Epstein Barr virus
  modified_base (1)..(25): A nucleotide ribose may be modified with 2'-O-methyl
  modified_base (1)..(25): A nucleotide ribose may be modified with 2'-O-methoxyethyl
  modified_base (1)..(25): A nucleotide ribose may be modified with 2'-fluorine
  modified_base (1)..(25): A nucleotide ribose may be modified with 2'-fluoroarabinonucleic acid
  modified_base (1)..(25): A nucleotide may contain a methylene bridge between the 2'-O and 4'-C positions of the ribose
  modified_base (1)..(25): A phosphodiester linkage may be replaced with a non-ionic phosphorothioate linkage
  modified_base (1)..(25): A phosphodiester linkage may be replaced with a non-ionic amide linkage
  ref <308>: DATABASE ACCESSION NUMBER: genbank/KP195701.01
  ref <309>: DATABASE ENTRY DATE: 2015-04-04
  ref <313>: RELEVANT RESIDUES IN SEQ ID NO: (102)..(125)
guugucuucccagacucugcuuucu

SEQ ID NO: 30 - DNA, 20 bp, Epstein Barr virus
  modified_base (1)..(20): A nucleotide ribose may be modified with 2'-O-methyl
  modified_base (1)..(20): A nucleotide ribose may be modified with 2'-O-methoxyethyl
  modified_base (1)..(20): A nucleotide ribose may be modified with 2'-fluorine
  modified_base (1)..(20): A nucleotide ribose may be modified with 2'-fluoroarabinonucleic acid
  modified_base (1)..(20): A nucleotide may contain a methylene bridge between the 2'-O and 4'-C positions of the ribose
  modified_base (1)..(20): A phosphodiester linkage may be replaced with a non-ionic phosphorothioate linkage
  modified_base (1)..(20): A phosphodiester linkage may be replaced with a non-ionic amide linkage
  ref <308>: DATABASE ACCESSION NUMBER: genbank/KP195701.1
  ref <309>: DATABASE ENTRY DATE: 2015-04-04
  ref <313>: RELEVANT RESIDUES IN SEQ ID NO: (90)..(109)
acggugucugugguugucuu

SEQ ID NO: 31 - DNA, 18 bp, Epstein Barr virus
  modified_base (1)..(18): A nucleotide ribose may be modified with 2'-O-methyl
  modified_base (1)..(18): A nucleotide ribose may be modified with 2'-O-methoxyethyl
  modified_base (1)..(18): A nucleotide ribose may be modified with 2'-fluorine
  modified_base (1)..(18): A nucleotide ribose may be modified with 2'-fluoroarabinonucleic acid
  modified_base (1)..(18): A nucleotide may contain a methylene bridge between the 2'-O and 4'-C positions of the ribose
  modified_base (1)..(18): A phosphodiester linkage may be replaced with a non-ionic phosphorothioate linkage
  modified_base (1)..(18): A phosphodiester linkage may be replaced with a non-ionic amide linkage
  ref <308>: DATABASE ACCESSION NUMBER: genbank/KP195701.1
  ref <309>: DATABASE ENTRY DATE: 2015-04-04
  ref <313>: RELEVANT RESIDUES IN SEQ ID NO: (69)..(86)
uacaagucccggguggug

SEQ ID NO: 32 - DNA, 15 bp, Epstein Barr virus
  modified_base (1)..(15): A nucleotide ribose may be modified with 2'-O-methyl
  modified_base (1)..(15): A nucleotide ribose may be modified with 2'-O-methoxyethyl
  modified_base (1)..(15): A nucleotide ribose may be modified with 2'-fluorine
  modified_base (1)..(15): A nucleotide ribose may be modified with 2'-fluoroarabinonucleic acid
  modified_base (1)..(15): A nucleotide may contain a methylene bridge between the 2'-O and 4'-C positions of the ribose
  modified_base (1)..(15): A phosphodiester linkage may be replaced with a non-ionic phosphorothioate linkage
  modified_base (1)..(15): A phosphodiester linkage may be replaced with a non-ionic amide linkage
  ref <308>: DATABASE ACCESSION NUMBER: genbank/KP195701.1
  ref <309>: DATABASE ENTRY DATE: 2015-04-04
  ref <313>: RELEVANT RESIDUES IN SEQ ID NO: (61)..(75)
gucccggguacaagu

SEQ ID NO: 33 - DNA, 20 bp, Epstein Barr virus
  modified_base (1)..(20): A nucleotide ribose may be modified with 2'-O-methyl
  modified_base (1)..(20): A nucleotide ribose may be modified with 2'-O-methoxyethyl
  modified_base (1)..(20): A nucleotide ribose may be modified with 2'-fluorine
  modified_base (1)..(20): A nucleotide ribose may be modified with 2'-fluoroarabinonucleic acid
  modified_base (1)..(20): A nucleotide may contain a methylene bridge between the 2'-O and 4'-C positions of the ribose
  modified_base (1)..(20): A phosphodiester linkage may be replaced with a non-ionic phosphorothioate linkage
  modified_base (1)..(20): A phosphodiester linkage may be replaced with a non-ionic amide linkage
  ref <308>: DATABASE ACCESSION NUMBER: genbank/KP195701.1
  ref <309>: DATABASE ENTRY DATE: 2015-04-04
  ref <313>: RELEVANT RESIDUES IN SEQ ID NO: (41)..(60)
guguguggcuguagccaccc

SEQ ID NO: 34 - DNA, 21 bp, Epstein Barr virus
  modified_base (1)..(21): A nucleotide ribose may be modified with 2'-O-methyl
  modified_base (1)..(21): A nucleotide ribose may be modified with 2'-O-methoxyethyl
  modified_base (1)..(21): A nucleotide ribose may be modified with 2'-fluorine
  modified_base (1)..(21): A nucleotide ribose may be modified with 2'-fluoroarabinonucleic acid
  modified_base (1)..(21): A nucleotide may contain a methylene bridge between the 2'-O and 4'-C positions of the ribose
  modified_base (1)..(21): A phosphodiester linkage may be replaced with a non-ionic phosphorothioate linkage
  modified_base (1)..(21): A phosphodiester linkage may be replaced with a non-ionic amide linkage
  ref <308>: DATABASE ACCESSION NUMBER: genbank/KP195701.1
  ref <309>: DATABASE ENTRY DATE: 2015-04-04
  ref <313>: RELEVANT RESIDUES IN SEQ ID NO: (19)..(39)
gagguuuugcuagggaggaga

SEQ ID NO: 35 - DNA, 21 bp, Epstein Barr virus
  modified_base (1)..(21): A nucleotide ribose may be modified with 2'-O-methyl
  modified_base (1)..(21): A nucleotide ribose may be modified with 2'-O-methoxyethyl
  modified_base (1)..(21): A nucleotide ribose may be modified with 2'-fluorine
  modified_base (1)..(21): A nucleotide ribose may be modified with 2'-fluoroarabinonucleic acid
  modified_base (1)..(21): A nucleotide may contain a methylene bridge between the 2'-O and 4'-C positions of the ribose
  modified_base (1)..(21): A phosphodiester linkage may be replaced with a non-ionic phosphorothioate linkage
  modified_base (1)..(21): A phosphodiester linkage may be replaced with a non-ionic amide linkage
  ref <308>: DATABASE ACCESSION NUMBER: genbank/KP195701.1
  ref <309>: DATABASE ENTRY DATE: 2015-04-04
  ref <313>: RELEVANT RESIDUES IN SEQ ID NO: (7)..(27)
uacgcugcccuagagguuuug

SEQ ID NO: 36 - DNA, 18 bp, Epstein Barr virus
  modified_base (1)..(18): A nucleotide ribose may be modified with 2'-O-methyl
  modified_base (1)..(18): A nucleotide ribose may be modified with 2'-O-methoxyethyl
  modified_base (1)..(18): A nucleotide ribose may be modified with 2'-fluorine
  modified_base (1)..(18): A nucleotide ribose may be modified with 2'-fluoroarabinonucleic acid
  modified_base (1)..(18): A nucleotide may contain a methylene bridge between the 2'-O and 4'-C positions of the ribose
  modified_base (1)..(18): A phosphodiester linkage may be replaced with a non-ionic phosphorothioate linkage
  modified_base (1)..(18): A phosphodiester linkage may be replaced with a non-ionic amide linkage
  ref <308>: DATABASE ACCESSION NUMBER: genbank/KP195701.1
  ref <309>: DATABASE ENTRY DATE: 2015-04-04
  ref <313>: RELEVANT RESIDUES IN SEQ ID NO: (1)..(18)
aggaccuacgcugcccua

SEQ ID NO: 37 - DNA, 21 bp, Epstein Barr virus
  modified_base (1)..(21): A nucleotide ribose may be modified with 2'-O-methyl
  modified_base (1)..(21): A nucleotide ribose may be modified with 2'-O-methoxyethyl
  modified_base (1)..(21): A nucleotide ribose may be modified with 2'-fluorine
  modified_base (1)..(21): A nucleotide ribose may be modified with 2'-fluoroarabinonucleic acid
  modified_base (1)..(21): A nucleotide may contain a methylene bridge between the 2'-O and 4'-C positions of the ribose
  modified_base (1)..(21): A phosphodiester linkage may be replaced with a non-ionic phosphorothioate linkage
  modified_base (1)..(21): A phosphodiester linkage may be replaced with a non-ionic amide linkage
  ref <308>: DATABASE ACCESSION NUMBER: genbank/AB065136
  ref <309>: DATABASE ENTRY DATE: 2001-10-23
  ref <313>: RELEVANT RESIDUES IN SEQ ID NO: (153)..(173)
ttcggcttgtccgctgttttt

SEQ ID NO: 38 - DNA, 22 bp, Epstein Barr virus
  modified_base (1)..(22): A nucleotide ribose may be modified with 2'-O-methyl
  modified_base (1)..(22): A nucleotide ribose may be modified with 2'-O-methoxyethyl
  modified_base (1)..(22): A nucleotide ribose may be modified with 2'-fluorine
  modified_base (1)..(22): A nucleotide ribose may be modified with 2'-fluoroarabinonucleic acid
  modified_base (1)..(22): A nucleotide may contain a methylene bridge between the 2'-O and 4'-C positions of the ribose
  modified_base (1)..(22): A phosphodiester linkage may be replaced with a non-ionic phosphorothioate linkage
  modified_base (1)..(22): A phosphodiester linkage may be replaced with a non-ionic amide linkage
  ref <308>: DATABASE ACCESSION NUMBER: genbank/AB065136.1
  ref <309>: DATABASE ENTRY DATE: 2001-10-23
  ref <313>: RELEVANT RESIDUES IN SEQ ID NO: (133)..(154)
atccctctgggagaagggtatt

SEQ ID NO: 39 - DNA, 21 bp, Epstein Barr virus
  modified_base (1)..(21): A nucleotide ribose may be modified with 2'-O-methyl
  modified_base (1)..(21): A nucleotide ribose may be modified with 2'-O-methoxyethyl
  modified_base (1)..(21): A nucleotide ribose may be modified with 2'-fluorine
  modified_base (1)..(21): A nucleotide ribose may be modified with 2'-fluoroarabinonucleic acid
  modified_base (1)..(21): A nucleotide may contain a methylene bridge between the 2'-O and 4'-C positions of the ribose
  modified_base (1)..(21): A phosphodiester linkage may be replaced with a non-ionic phosphorothioate linkage
  modified_base (1)..(21): A phosphodiester linkage may be replaced with a non-ionic amide linkage
  ref <308>: DATABASE ACCESSION NUMBER: genbank/AB065136
  ref <309>: DATABASE ENTRY DATE: 2001-10-23
  ref <313>: RELEVANT RESIDUES IN SEQ ID NO: (113)..(133)
ttgcaagtcaggattctctaa

SEQ ID NO: 40 - DNA, 19 bp, Epstein Barr virus
  modified_base (1)..(19): A nucleotide ribose may be modified with 2'-O-methyl
  modified_base (1)..(19): A nucleotide ribose may be modified with 2'-O-methoxyethyl
  modified_base (1)..(19): A nucleotide ribose may be modified with 2'-fluorine
  modified_base (1)..(19): A nucleotide ribose may be modified with 2'-fluoroarabinonucleic acid
  modified_base (1)..(19): A nucleotide may contain a methylene bridge between the 2'-O and 4'-C positions of the ribose
  modified_base (1)..(19): A phosphodiester linkage may be replaced with a non-ionic phosphorothioate linkage
  modified_base (1)..(19): A phosphodiester linkage may be replaced with a non-ionic amide linkage
  ref <308>: DATABASE ACCESSION NUMBER: genbank/AB065136
  ref <309>: DATABASE ENTRY DATE: 2001-10-23
  ref <313>: RELEVANT RESIDUES IN SEQ ID NO: (105)..(123)
agagcatttgcaagtcagg

SEQ ID NO: 41 - DNA, 20 bp, Epstein Barr virus
  modified_base (1)..(20): A nucleotide ribose may be modified with 2'-O-methyl
  modified_base (1)..(20): A nucleotide ribose may be modified with 2'-O-methoxyethyl
  modified_base (1)..(20): A nucleotide ribose may be modified with 2'-fluorine
  modified_base (1)..(20): A nucleotide ribose may be modified with 2'-fluoroarabinonucleic acid
  modified_base (1)..(20): A nucleotide may contain a methylene bridge between the 2'-O and 4'-C positions of the ribose
  modified_base (1)..(20): A phosphodiester linkage may be replaced with a non-ionic phosphorothioate linkage
  modified_base (1)..(20): A phosphodiester linkage may be replaced with a non-ionic amide linkage
  ref <308>: DATABASE ACCESSION NUMBER: genbank/ AB065136
  ref <309>: DATABASE ENTRY DATE: 2001-10-23
  ref <313>: RELEVANT RESIDUES IN SEQ ID NO: (83)..(102)
aggagaagagaggcttcccg

SEQ ID NO: 42 - DNA, 19 bp, Epstein Barr virus
  modified_base (1)..(19): A nucleotide ribose may be modified with 2'-O-methyl
  modified_base (1)..(19): A nucleotide ribose may be modified with 2'-O-methoxyethyl
  modified_base (1)..(19): A nucleotide ribose may be modified with 2'-fluorine
  modified_base (1)..(19): A nucleotide ribose may be modified with 2'-fluoroarabinonucleic acid
  modified_base (1)..(19): A nucleotide may contain a methylene bridge between the 2'-O and 4'-C positions of the ribose
  modified_base (1)..(19): A phosphodiester linkage may be replaced with a non-ionic phosphorothioate linkage
  modified_base (1)..(19): A phosphodiester linkage may be replaced with a non-ionic amide linkage
  ref <308>: DATABASE ACCESSION NUMBER: genbank/AB065136
  ref <309>: DATABASE ENTRY DATE: 2001-10-23
  ref <313>: RELEVANT RESIDUES IN SEQ ID NO: (62)..(80)
cccgaggtcaagtcccggg

SEQ ID NO: 43 - DNA, 20 bp, Epstein Barr virus
  modified_base (1)..(20): A nucleotide ribose may be modified with 2'-O-methyl
  modified_base (1)..(20): A nucleotide ribose may be modified with 2'-O-methoxyethyl
  modified_base (1)..(20): A nucleotide ribose may be modified with 2'-fluorine
  modified_base (1)..(20): A nucleotide may contain a methylene bridge between the 2'-O and 4'-C positions of the ribose
  modified_base (1)..(20): A phosphodiester linkage may be replaced with a non-ionic phosphorothioate linkage
  modified_base (1)..(20): A nucleotide ribose may be modified with 2'-fluoroarabinonucleic acid
  modified_base (1)..(20): A phosphodiester linkage may be replaced with a non-ionic amide linkage
  ref <308>: DATABASE ACCESSION NUMBER: genbank/AB065136
  ref <309>: DATABASE ENTRY DATE: 2001-10-23
  ref <313>: RELEVANT RESIDUES IN SEQ ID NO: (42)..(61)
gctcagtgcggtgctaccga

SEQ ID NO: 44 - DNA, 20 bp, Epstein Barr virus
  modified_base (1)..(20): A nucleotide ribose may be modified with 2'-O-methyl
  modified_base (1)..(20): A nucleotide ribose may be modified with 2'-O-methoxyethyl
  modified_base (1)..(20): A nucleotide ribose may be modified with 2'-fluorine
  modified_base (1)..(20): A nucleotide ribose may be modified with 2'-fluoroarabinonucleic acid
  modified_base (1)..(20): A nucleotide may contain a methylene bridge between the 2'-O and 4'-C positions of the ribose
  modified_base (1)..(20): A phosphodiester linkage may be replaced with a non-ionic phosphorothioate linkage
  modified_base (1)..(20): A phosphodiester linkage may be replaced with a non-ionic amide linkage
  ref <308>: DATABASE ACCESSION NUMBER: genbank/AB065136
  ref <309>: DATABASE ENTRY DATE: 2001-10-23
  ref <313>: RELEVANT RESIDUES IN SEQ ID NO: (27)..(46)
ggacacaccgccaacgctca

SEQ ID NO: 45 - DNA, 20 bp, Epstein Barr virus
  modified_base (1)..(20): A nucleotide ribose may be modified with 2'-O-methyl
  modified_base (1)..(20): A nucleotide ribose may be modified with 2'-O-methoxyethyl
  modified_base (1)..(20): A nucleotide ribose may be modified with 2'-fluorine
  modified_base (1)..(20): A nucleotide ribose may be modified with 2'-fluoroarabinonucleic acid
  modified_base (1)..(20): A nucleotide may contain a methylene bridge between the 2'-O and 4'-C positions of the ribose
  modified_base (1)..(20): A phosphodiester linkage may be replaced with a non-ionic phosphorothioate linkage
  modified_base (1)..(20): A phosphodiester linkage may be replaced with a non-ionic amide linkage
  ref <308>: DATABASE ACCESSION NUMBER: genbank/ AB065136
  ref <309>: DATABASE ENTRY DATE: 2001-10-23
  ref <313>: RELEVANT RESIDUES IN SEQ ID NO: (21)..(40)
ggtttcggacacaccgccaa

SEQ ID NO: 46 - DNA, 20 bp, Epstein Barr virus
  modified_base (1)..(20): A nucleotide ribose may be modified with 2'-O-methyl
  modified_base (1)..(20): A nucleotide ribose may be modified with 2'-O-methoxyethyl
  modified_base (1)..(20): A nucleotide ribose may be modified with 2'-fluorine
  modified_base (1)..(20): A nucleotide ribose may be modified with 2'-fluoroarabinonucleic acid
  modified_base (1)..(20): A nucleotide may contain a methylene bridge between the 2'-O and 4'-C positions of the ribose
  modified_base (1)..(20): A phosphodiester linkage may be replaced with a non-ionic phosphorothioate linkage
  modified_base (1)..(20): A phosphodiester linkage may be replaced with a non-ionic amide linkage
  ref <308>: DATABASE ACCESSION NUMBER: genbank/AB065136
  ref <309>: DATABASE ENTRY DATE: 2001-10-23
  ref <313>: RELEVANT RESIDUES IN SEQ ID NO: (11)..(30)
ttgccctagtggtttcggac

SEQ ID NO: 47 - DNA, 25 bp, Epstein Barr virus
  modified_base (1)..(25): A nucleotide ribose may be modified with 2'-O-methyl
  modified_base (1)..(25): A nucleotide ribose may be modified with 2'-O-methoxyethyl
  modified_base (1)..(25): A nucleotide ribose may be modified with 2'-fluorine
  modified_base (1)..(25): A nucleotide ribose may be modified with 2'-fluoroarabinonucleic acid
  modified_base (1)..(25): A nucleotide may contain a methylene bridge between the 2'-O and 4'-C positions of the ribose
  modified_base (1)..(25): A phosphodiester linkage may be replaced with a non-ionic phosphorothioate linkage
  modified_base (1)..(25): A phosphodiester linkage may be replaced with a non-ionic amide linkage
  ref <308>: DATABASE ACCESSION NUMBER: genbank/LN827555
  ref <309>: DATABASE ENTRY DATE: 2015-09-24
  ref <313>: RELEVANT RESIDUES IN SEQ ID NO: (270)..(294)
gagtcccagtagtcagtcatcatca

SEQ ID NO: 48 - DNA, 25 bp, Epstein Barr virus
  modified_base (1)..(25): A nucleotide ribose may be modified with 2'-O-methyl
  modified_base (1)..(25): A nucleotide ribose may be modified with 2'-fluorine
  modified_base (1)..(25): A nucleotide ribose may be modified with 2'-O-methoxyethyl
  modified_base (1)..(25): A nucleotide ribose may be modified with 2'-fluoroarabinonucleic acid
  modified_base (1)..(25): A nucleotide may contain a methylene bridge between the 2'-O and 4'-C positions of the ribose
  modified_base (1)..(25): A phosphodiester linkage may be replaced with a non-ionic phosphorothioate linkage
  modified_base (1)..(25): A phosphodiester linkage may be replaced with a non-ionic amide linkage
  ref <308>: DATABASE ACCESSION NUMBER: genbank/ LN827555
  ref <309>: DATABASE ENTRY DATE: 2015-09-24
  ref <313>: RELEVANT RESIDUES IN SEQ ID NO: (532)..(556)
ggtcaaggaggttccaacccgaaat

SEQ ID NO: 49 - DNA, 25 bp, Epstein Barr virus
  modified_base (1)..(25): A nucleotide ribose may be modified with 2'-O-methyl
  modified_base (1)..(25): A nucleotide ribose may be modified with 2'-O-methoxyethyl
  modified_base (1)..(25): A nucleotide ribose may be modified with 2'-fluorine
  modified_base (1)..(25): A nucleotide ribose may be modified with 2'-fluoroarabinonucleic acid
  modified_base (1)..(25): A nucleotide may contain a methylene bridge between the 2'-O and 4'-C positions of the ribose
  modified_base (1)..(25): A phosphodiester linkage may be replaced with a non-ionic phosphorothioate linkage
  modified_base (1)..(25): A phosphodiester linkage may be replaced with a non-ionic amide linkage
  ref <308>: DATABASE ACCESSION NUMBER: genbank/LN827555
  ref <309>: DATABASE ENTRY DATE: 2015-09-24
  ref <313>: RELEVANT RESIDUES IN SEQ ID NO: (571)..(595)
gaaggtttaagagctctcctggcta

SEQ ID NO: 50 - DNA, 25 bp, Epstein Barr virus
  modified_base (1)..(25): A nucleotide ribose may be modified with 2'-O-methyl
  modified_base (1)..(25): A nucleotide ribose may be modified with 2'-O-methoxyethyl
  modified_base (1)..(25): A nucleotide ribose may be modified with 2'-fluoroarabinonucleic acid
  modified_base (1)..(25): A nucleotide may contain a methylene bridge between the 2'-O and 4'-C positions of the ribose
  modified_base (1)..(25): A phosphodiester linkage may be replaced with a non-ionic phosphorothioate linkage
  modified_base (1)..(25): A nucleotide ribose may be modified with 2'-fluorine
  modified_base (1)..(25): A phosphodiester linkage may be replaced with a non-ionic amide linkage
  ref <308>: DATABASE ACCESSION NUMBER: genbank/LN827555
  ref <309>: DATABASE ENTRY DATE: 2015-09-24
  ref <313>: RELEVANT RESIDUES IN SEQ ID NO: (655)..(679)
ggaggtagtaagacctccctttaca

SEQ ID NO: 51 - DNA, 25 bp, Epstein Barr virus
  modified_base (1)..(25): A nucleotide ribose may be modified with 2'-O-methyl
  modified_base (1)..(25): A nucleotide ribose may be modified with 2'-O-methoxyethyl
  modified_base (1)..(25): A nucleotide ribose may be modified with 2'-fluorine
  modified_base (1)..(25): A nucleotide ribose may be modified with 2'-fluoroarabinonucleic acid
  modified_base (1)..(25): A nucleotide may contain a methylene bridge between the 2'-O and 4'-C positions of the ribose
  modified_base (1)..(25): A phosphodiester linkage may be replaced with a non-ionic phosphorothioate linkage
  modified_base (1)..(25): A phosphodiester linkage may be replaced with a non-ionic amide linkage
  ref <308>: DATABASE ACCESSION NUMBER: genbank/L827555
  ref <309>: DATABASE ENTRY DATE: 2015-09-24
  ref <313>: RELEVANT RESIDUES IN SEQ ID NO: (781)..(805)
ccgctaagggagtccattgtctgtt

SEQ ID NO: 52 - DNA, 25 bp, Epstein Barr virus
  modified_base (1)..(25): A nucleotide ribose may be modified with 2'-O-methyl
  modified_base (1)..(25): A nucleotide ribose may be modified with 2'-O-methoxyethyl
  modified_base (1)..(25): A nucleotide ribose may be modified with 2'-fluorine
  modified_base (1)..(25): A nucleotide ribose may be modified with 2'-fluoroarabinonucleic acid
  modified_base (1)..(25): A nucleotide may contain a methylene bridge between the 2'-O and 4'-C positions of the ribose
  modified_base (1)..(25): A phosphodiester linkage may be replaced with a non-ionic phosphorothioate linkage
  modified_base (1)..(25): A phosphodiester linkage may be replaced with a non-ionic amide linkage
  ref <308>: DATABASE ACCESSION NUMBER: genbank/LN827555
  ref <309>: DATABASE ENTRY DATE: 2015-09-24
  ref <313>: RELEVANT RESIDUES IN SEQ ID NO: (783)..(807)
gctaagggagtccattgtctgttat

SEQ ID NO: 53 - DNA, 25 bp, Epstein Barr virus
  modified_base (1)..(25): A nucleotide ribose may be modified with 2'-O-methyl
  modified_base (1)..(25): A nucleotide ribose may be modified with 2'-O-methoxyethyl
  modified_base (1)..(25): A nucleotide ribose may be modified with 2'-fluorine
  modified_base (1)..(25): A nucleotide ribose may be modified with 2'-fluoroarabinonucleic acid
  modified_base (1)..(25): A nucleotide may contain a methylene bridge between the 2'-O and 4'-C positions of the ribose
  modified_base (1)..(25): A phosphodiester linkage may be replaced with a non-ionic phosphorothioate linkage
  modified_base (1)..(25): A phosphodiester linkage may be replaced with a non-ionic amide linkage
  ref <308>: DATABASE ACCESSION NUMBER: genbank/LN827555
  ref <309>: DATABASE ENTRY DATE: 2015-09-24
  ref <313>: RELEVANT RESIDUES IN SEQ ID NO: (788)..(812)
gggagtccattgtctgttatttcat

SEQ ID NO: 54 - DNA, 25 bp, Epstein Barr virus
  modified_base (1)..(25): A nucleotide ribose may be modified with 2'-O-methyl
  modified_base (1)..(25): A nucleotide ribose may be modified with 2'-O-methoxyethyl
  modified_base (1)..(25): A nucleotide ribose may be modified with 2'-fluorine
  modified_base (1)..(25): A nucleotide ribose may be modified with 2'-fluoroarabinonucleic acid
  modified_base (1)..(25): A nucleotide may contain a methylene bridge between the 2'-O and 4'-C positions of the ribose
  modified_base (1)..(25): A phosphodiester linkage may be replaced with a non-ionic phosphorothioate linkage
  modified_base (1)..(25): A phosphodiester linkage may be replaced with a non-ionic amide linkage
  ref <308>: DATABASE ACCESSION NUMBER: genbank/LN827555
  ref <309>: DATABASE ENTRY DATE: 2015-09-24
  ref <313>: RELEVANT RESIDUES IN SEQ ID NO: (794)..(818)
ccattgtctgttatttcatggtctt

SEQ ID NO: 55 - DNA, 25 bp, Epstein Barr virus
  modified_base (1)..(25): A nucleotide ribose may be modified with 2'-O-methyl
  modified_base (1)..(25): A nucleotide ribose may be modified with 2'-O-methoxyethyl
  modified_base (1)..(25): A nucleotide ribose may be modified with 2'-fluorine
  modified_base (1)..(25): A nucleotide ribose may be modified with 2'-fluoroarabinonucleic acid
  modified_base (1)..(25): A nucleotide may contain a methylene bridge between the 2'-O and 4'-C positions of the ribose
  modified_base (1)..(25): A phosphodiester linkage may be replaced with a non-ionic phosphorothioate linkage
  modified_base (1)..(25): A phosphodiester linkage may be replaced with a non-ionic amide linkage
  ref <308>: DATABASE ACCESSION NUMBER: genbank/LN827555
  ref <309>: DATABASE ENTRY DATE: 2015-09-24
  ref <313>: RELEVANT RESIDUES IN SEQ ID NO: (851)..(875)
aggatgcgattaaggaccttgttat

SEQ ID NO: 56 - DNA, 25 bp, Epstein Barr virus
  modified_base (1)..(25): A nucleotide ribose may be modified with 2'-O-methyl
  modified_base (1)..(25): A nucleotide ribose may be modified with 2'-O-methoxyethyl
  modified_base (1)..(25): A nucleotide ribose may be modified with 2'-fluorine
  modified_base (1)..(25): A nucleotide ribose may be modified with 2'-fluoroarabinonucleic acid
  modified_base (1)..(25): A nucleotide may contain a methylene bridge between the 2'-O and 4'-C positions of the ribose
  modified_base (1)..(25): A phosphodiester linkage may be replaced with a non-ionic phosphorothioate linkage
  modified_base (1)..(25): A phosphodiester linkage may be replaced with a non-ionic amide linkage
  ref <308>: DATABASE ACCESSION NUMBER: genbank/LN827555
  ref <309>: DATABASE ENTRY DATE: 2015-09-24
  ref <313>: RELEVANT RESIDUES IN SEQ ID NO: (893)..(917)
cctgcaatatcagggtgactgtgtg

SEQ ID NO: 57 - DNA, 25 bp, Epstein Barr virus
  modified_base (1)..(25): A nucleotide ribose may be modified with 2'-O-methyl
  modified_base (1)..(25): A nucleotide ribose may be modified with 2'-O-methoxyethyl
  modified_base (1)..(25): A nucleotide ribose may be modified with 2'-fluorine
  modified_base (1)..(25): A nucleotide ribose may be modified with 2'-fluoroarabinonucleic acid
  modified_base (1)..(25): A nucleotide may contain a methylene bridge between the 2'-O and 4'-C positions of the ribose
  modified_base (1)..(25): A phosphodiester linkage may be replaced with a non-ionic phosphorothioate linkage
  modified_base (1)..(25): A phosphodiester linkage may be replaced with a non-ionic amide linkage
  ref <308>: DATABASE ACCESSION NUMBER: genbank/ MG021307.1
  ref <309>: DATABASE ENTRY DATE: 2018-03-05
  ref <313>: RELEVANT RESIDUES IN SEQ ID NO: (3)..(27)
gcctacattctatcttgcgttacat

SEQ ID NO: 58 - DNA, 25 bp, Epstein Barr virus
  modified_base (1)..(25): A nucleotide ribose may be modified with 2'-O-methyl
  modified_base (1)..(25): A nucleotide ribose may be modified with 2'-O-methoxyethyl
  modified_base (1)..(25): A nucleotide ribose may be modified with 2'-fluorine
  modified_base (1)..(25): A nucleotide ribose may be modified with 2'-fluoroarabinonucleic acid
  modified_base (1)..(25): A nucleotide may contain a methylene bridge between the 2'-O and 4'-C positions of the ribose
  modified_base (1)..(25): A phosphodiester linkage may be replaced with a non-ionic phosphorothioate linkage
  modified_base (1)..(25): A phosphodiester linkage may be replaced with a non-ionic amide linkage
  ref <308>: DATABASE ACCESSION NUMBER: genbank/MG021307.1
  ref <309>: DATABASE ENTRY DATE: 2018-03-05
  ref <313>: RELEVANT RESIDUES IN SEQ ID NO: (45)..(69)
tctaattgttgacacggatagtcat

SEQ ID NO: 59 - DNA, 25 bp, Epstein Barr virus
  modified_base (1)..(25): A nucleotide ribose may be modified with 2'-O-methyl
  modified_base (1)..(25): A nucleotide ribose may be modified with 2'-O-methoxyethyl
  modified_base (1)..(25): A nucleotide ribose may be modified with 2'-fluorine
  modified_base (1)..(25): A nucleotide ribose may be modified with 2'-fluoroarabinonucleic acid
  modified_base (1)..(25): A nucleotide may contain a methylene bridge between the 2'-O and 4'-C positions of the ribose
  modified_base (1)..(25): A phosphodiester linkage may be replaced with a non-ionic phosphorothioate linkage
  modified_base (1)..(25): A phosphodiester linkage may be replaced with a non-ionic amide linkage
  ref <308>: DATABASE ACCESSION NUMBER: genbank/MG021307
  ref <309>: DATABASE ENTRY DATE: 2018-03-05
  ref <313>: RELEVANT RESIDUES IN SEQ ID NO: (112)..(136)
gaacaactgtcagacactccattaa

SEQ ID NO: 60 - DNA, 25 bp, Epstein Barr virus
  modified_base (1)..(25): A nucleotide ribose may be modified with 2'-O-methyl
  modified_base (1)..(25): A nucleotide ribose may be modified with 2'-O-methoxyethyl
  modified_base (1)..(25): A nucleotide ribose may be modified with 2'-fluorine
  modified_base (1)..(25): A nucleotide ribose may be modified with 2'-fluoroarabinonucleic acid
  modified_base (1)..(25): A nucleotide may contain a methylene bridge between the 2'-O and 4'-C positions of the ribose
  modified_base (1)..(25): A phosphodiester linkage may be replaced with a non-ionic phosphorothioate linkage
  modified_base (1)..(25): A phosphodiester linkage may be replaced with a non-ionic amide linkage
  ref <308>: DATABASE ACCESSION NUMBER: genbank/MG021307
  ref <309>: DATABASE ENTRY DATE: 2018-03-05
  ref <313>: RELEVANT RESIDUES IN SEQ ID NO: (124)..(148)
gacactccattaattccactaacaa

SEQ ID NO: 61 - DNA, 25 bp, Epstein Barr virus
  modified_base (1)..(25): A nucleotide ribose may be modified with 2'-O-methyl
  modified_base (1)..(25): A nucleotide ribose may be modified with 2'-O-methoxyethyl
  modified_base (1)..(25): A nucleotide ribose may be modified with 2'-fluorine
  modified_base (1)..(25): A nucleotide ribose may be modified with 2'-fluoroarabinonucleic acid
  modified_base (1)..(25): A nucleotide may contain a methylene bridge between the 2'-O and 4'-C positions of the ribose
  modified_base (1)..(25): A phosphodiester linkage may be replaced with a non-ionic phosphorothioate linkage
  modified_base (1)..(25): A phosphodiester linkage may be replaced with a non-ionic amide linkage
  ref <308>: DATABASE ACCESSION NUMBER: genbank/MG021307
  ref <309>: DATABASE ENTRY DATE: 2018-03-05
  ref <313>: RELEVANT RESIDUES IN SEQ ID NO: (674)..(698)
caccactactcacggtactacaaag

SEQ ID NO: 62 - DNA, 25 bp, Epstein Barr virus
  modified_base (1)..(25): A nucleotide ribose may be modified with 2'-O-methyl
  modified_base (1)..(25): A nucleotide ribose may be modified with 2'-O-methoxyethyl
  modified_base (1)..(25): A nucleotide ribose may be modified with 2'-fluorine
  modified_base (1)..(25): A nucleotide ribose may be modified with 2'-fluoroarabinonucleic acid
  modified_base (1)..(25): A nucleotide may contain a methylene bridge between the 2'-O and 4'-C positions of the ribose
  modified_base (1)..(25): A phosphodiester linkage may be replaced with a non-ionic phosphorothioate linkage
  modified_base (1)..(25): A phosphodiester linkage may be replaced with a non-ionic amide linkage
  ref <308>: DATABASE ACCESSION NUMBER: genbank/MG021307
  ref <309>: DATABASE ENTRY DATE: 2018-03-05
  ref <313>: RELEVANT RESIDUES IN SEQ ID NO: (684)..(708)
cacggtactacaaaggcctaccgaa

SEQ ID NO: 63 - DNA, 25 bp, Epstein Barr virus
  modified_base (1)..(25): A nucleotide ribose may be modified with 2'-O-methyl
  modified_base (1)..(25): A nucleotide ribose may be modified with 2'-O-methoxyethyl
  modified_base (1)..(25): A nucleotide ribose may be modified with 2'-fluorine
  modified_base (1)..(25): A nucleotide ribose may be modified with 2'-fluoroarabinonucleic acid
  modified_base (1)..(25): A nucleotide may contain a methylene bridge between the 2'-O and 4'-C positions of the ribose
  modified_base (1)..(25): A phosphodiester linkage may be replaced with a non-ionic phosphorothioate linkage
  modified_base (1)..(25): A phosphodiester linkage may be replaced with a non-ionic amide linkage
  ref <308>: DATABASE ACCESSION NUMBER: genbank/MG021307
  ref <309>: DATABASE ENTRY DATE: 2018-03-05
  ref <313>: RELEVANT RESIDUES IN SEQ ID NO: (760)..(784)
ccagaccaatcaatgcaccctctta

SEQ ID NO: 64 - DNA, 25 bp, Epstein Barr virus
  modified_base (1)..(25): A nucleotide ribose may be modified with 2'-O-methyl
  modified_base (1)..(25): A nucleotide ribose may be modified with 2'-O-methoxyethyl
  modified_base (1)..(25): A nucleotide ribose may be modified with 2'-fluorine
  modified_base (1)..(25): A nucleotide ribose may be modified with 2'-fluoroarabinonucleic acid
  modified_base (1)..(25): A nucleotide may contain a methylene bridge between the 2'-O and 4'-C positions of the ribose
  modified_base (1)..(25): A phosphodiester linkage may be replaced with a non-ionic phosphorothioate linkage
  modified_base (1)..(25): A phosphodiester linkage may be replaced with a non-ionic amide linkage
  ref <308>: DATABASE ACCESSION NUMBER: genbank/MG021307
  ref <309>: DATABASE ENTRY DATE: 2018-03-05
  ref <313>: RELEVANT RESIDUES IN SEQ ID NO: (765)..(789)
ccaatcaatgcaccctcttactcat

SEQ ID NO: 65 - DNA, 25 bp, Epstein Barr virus
  modified_base (1)..(25): A nucleotide ribose may be modified with 2'-O-methyl
  modified_base (1)..(25): A nucleotide ribose may be modified with 2'-O-methoxyethyl
  modified_base (1)..(25): A nucleotide ribose may be modified with 2'-fluorine
  modified_base (1)..(25): A nucleotide ribose may be modified with 2'-fluoroarabinonucleic acid
  modified_base (1)..(25): A nucleotide may contain a methylene bridge between the 2'-O and 4'-C positions of the ribose
  modified_base (1)..(25): A phosphodiester linkage may be replaced with a non-ionic phosphorothioate linkage
  modified_base (1)..(25): A phosphodiester linkage may be replaced with a non-ionic amide linkage
  ref <308>: DATABASE ACCESSION NUMBER: genbannk/ MG021307
  ref <309>: DATABASE ENTRY DATE: 2018-03-05
  ref <313>: RELEVANT RESIDUES IN SEQ ID NO: (917)..(941)
gggtcatcaacgaccaacaattaca

SEQ ID NO: 66 - DNA, 25 bp, Epstein Barr virus
  modified_base (1)..(25): A nucleotide ribose may be modified with 2'-O-methyl
  modified_base (1)..(25): A nucleotide ribose may be modified with 2'-O-methoxyethyl
  modified_base (1)..(25): A nucleotide ribose may be modified with 2'-fluorine
  modified_base (1)..(25): A nucleotide ribose may be modified with 2'-fluoroarabinonucleic acid
  modified_base (1)..(25): A nucleotide may contain a methylene bridge between the 2'-O and 4'-C positions of the ribose
  modified_base (1)..(25): A phosphodiester linkage may be replaced with a non-ionic phosphorothioate linkage
  modified_base (1)..(25): A phosphodiester linkage may be replaced with a non-ionic amide linkage
  ref <308>: DATABASE ACCESSION NUMBER: genbank/MG021307
  ref <309>: DATABASE ENTRY DATE: 2018-03-05
  ref <313>: RELEVANT RESIDUES IN SEQ ID NO: (924)..(948)
caacgaccaacaattacatcatcta

SEQ ID NO: 67 - DNA, 25 bp, Epstein Barr virus
  modified_base (1)..(25): A nucleotide ribose may be modified with 2'-O-methyl
  modified_base (1)..(25): A nucleotide ribose may be modified with 2'-O-methoxyethyl
  modified_base (1)..(25): A nucleotide ribose may be modified with 2'-fluorine
  modified_base (1)..(25): A nucleotide ribose may be modified with 2'-fluoroarabinonucleic acid
  modified_base (1)..(25): A nucleotide may contain a methylene bridge between the 2'-O and 4'-C positions of the ribose
  modified_base (1)..(25): A phosphodiester linkage may be replaced with a non-ionic phosphorothioate linkage
  modified_base (1)..(25): A phosphodiester linkage may be replaced with a non-ionic amide linkage
  ref <308>: DATABASE ACCESSION NUMBER: genbank/MG021310
  ref <309>: DATABASE ENTRY DATE: 2018-03-05
  ref <313>: RELEVANT RESIDUES IN SEQ ID NO: (242)..(266)
gagccctttgtatactcctactgat

SEQ ID NO: 68 - DNA, 25 bp, Epstein Barr virus
  modified_base (1)..(25): A nucleotide ribose may be modified with 2'-O-methyl
  modified_base (1)..(25): A nucleotide ribose may be modified with 2'-O-methoxyethyl
  modified_base (1)..(25): A nucleotide ribose may be modified with 2'-fluorine
  modified_base (1)..(25): A nucleotide ribose may be modified with 2'-fluoroarabinonucleic acid
  modified_base (1)..(25): A nucleotide may contain a methylene bridge between the 2'-O and 4'-C positions of the ribose
  modified_base (1)..(25): A phosphodiester linkage may be replaced with a non-ionic phosphorothioate linkage
  modified_base (1)..(25): A phosphodiester linkage may be replaced with a non-ionic amide linkage
  ref <308>: DATABASE ACCESSION NUMBER: genbank/MG021310
  ref <309>: DATABASE ENTRY DATE: 2018-03-05
  ref <313>: RELEVANT RESIDUES IN SEQ ID NO: (362)..(386)
tcgctctctggaatttgcacggaca

SEQ ID NO: 69 - DNA, 25 bp, Epstein Barr virus
  modified_base (1)..(25): A nucleotide ribose may be modified with 2'-O-methyl
  modified_base (1)..(25): A nucleotide ribose may be modified with 2'-O-methoxyethyl
  modified_base (1)..(25): A nucleotide ribose may be modified with 2'-fluorine
  modified_base (1)..(25): A nucleotide ribose may be modified with 2'-fluoroarabinonucleic acid
  modified_base (1)..(25): A nucleotide may contain a methylene bridge between the 2'-O and 4'-C positions of the ribose
  modified_base (1)..(25): A phosphodiester linkage may be replaced with a non-ionic phosphorothioate linkage
  modified_base (1)..(25): A phosphodiester linkage may be replaced with a non-ionic amide linkage
  ref <308>: DATABASE ACCESSION NUMBER: genbank/MG021310
  ref <309>: DATABASE ENTRY DATE: 2018-03-05
  ref <313>: RELEVANT RESIDUES IN SEQ ID NO: (379)..(403)
cacggacaggcattgttccttggaa

SEQ ID NO: 70 - DNA, 25 bp, Epstein Barr virus
  modified_base (1)..(25): A nucleotide ribose may be modified with 2'-O-methyl
  modified_base (1)..(25): A nucleotide ribose may be modified with 2'-O-methoxyethyl
  modified_base (1)..(25): A nucleotide ribose may be modified with 2'-fluorine
  modified_base (1)..(25): A nucleotide ribose may be modified with 2'-fluoroarabinonucleic acid
  modified_base (1)..(25): A nucleotide may contain a methylene bridge between the 2'-O and 4'-C positions of the ribose
  modified_base (1)..(25): A phosphodiester linkage may be replaced with a non-ionic phosphorothioate linkage
  modified_base (1)..(25): A phosphodiester linkage may be replaced with a non-ionic amide linkage
  ref <308>: DATABASE ACCESSION NUMBER: genbank/MG021310
  ref <309>: DATABASE ENTRY DATE: 2018-03-05
  ref <313>: RELEVANT RESIDUES IN SEQ ID NO: (413)..(437)
tcatcttcgggtgcttacttggtaa

SEQ ID NO: 71 - DNA, 25 bp, Epstein Barr virus
  modified_base (1)..(25): A nucleotide ribose may be modified with 2'-O-methyl
  modified_base (1)..(25): A nucleotide ribose may be modified with 2'-O-methoxyethyl
  modified_base (1)..(25): A nucleotide ribose may be modified with 2'-fluorine
  modified_base (1)..(25): A nucleotide ribose may be modified with 2'-fluoroarabinonucleic acid
  modified_base (1)..(25): A nucleotide may contain a methylene bridge between the 2'-O and 4'-C positions of the ribose
  modified_base (1)..(25): A phosphodiester linkage may be replaced with a non-ionic phosphorothioate linkage
  modified_base (1)..(25): A phosphodiester linkage may be replaced with a non-ionic amide linkage
  ref <308>: DATABASE ACCESSION NUMBER: genbank/MG021310
  ref <309>: DATABASE ENTRY DATE: 2018-03-05
  ref <313>: RELEVANT RESIDUES IN SEQ ID NO: (506)..(530)
gcagtcttaggtatctggatctact

SEQ ID NO: 72 - DNA, 25 bp, Epstein Barr virus
  modified_base (1)..(25): A nucleotide ribose may be modified with 2'-O-methyl
  modified_base (1)..(25): A nucleotide ribose may be modified with 2'-O-methoxyethyl
  modified_base (1)..(25): A nucleotide ribose may be modified with 2'-fluorine
  modified_base (1)..(25): A nucleotide ribose may be modified with 2'-fluoroarabinonucleic acid
  modified_base (1)..(25): A nucleotide may contain a methylene bridge between the 2'-O and 4'-C positions of the ribose
  modified_base (1)..(25): A phosphodiester linkage may be replaced with a non-ionic phosphorothioate linkage
  modified_base (1)..(25): A phosphodiester linkage may be replaced with a non-ionic amide linkage
  ref <308>: DATABASE ACCESSION NUMBER: genbank/MG021310
  ref <309>: DATABASE ENTRY DATE: 2018-03-05
  ref <313>: RELEVANT RESIDUES IN SEQ ID NO: (788)..(812)
ggccatgaatctgactctaactcca

SEQ ID NO: 73 - DNA, 25 bp, Epstein Barr virus
  modified_base (1)..(25): A nucleotide ribose may be modified with 2'-O-methyl
  modified_base (1)..(25): A nucleotide ribose may be modified with 2'-O-methoxyethyl
  modified_base (1)..(25): A nucleotide ribose may be modified with 2'-fluorine
  modified_base (1)..(25): A nucleotide ribose may be modified with 2'-fluoroarabinonucleic acid
  modified_base (1)..(25): A nucleotide may contain a methylene bridge between the 2'-O and 4'-C positions of the ribose
  modified_base (1)..(25): A phosphodiester linkage may be replaced with a non-ionic phosphorothioate linkage
  modified_base (1)..(25): A phosphodiester linkage may be replaced with a non-ionic amide linkage
  ref <308>: DATABASE ACCESSION NUMBER: genbank/MG021310
  ref <309>: DATABASE ENTRY DATE: 2018-03-05
  ref <313>: RELEVANT RESIDUES IN SEQ ID NO: (1078)..(1102)
tagccctagcgactctgctggaaat

SEQ ID NO: 74 - DNA, 25 bp, Epstein Barr virus
  modified_base (1)..(25): A nucleotide ribose may be modified with 2'-O-methyl
  modified_base (1)..(25): A nucleotide ribose may be modified with 2'-O-methoxyethyl
  modified_base (1)..(25): A nucleotide ribose may be modified with 2'-fluorine
  modified_base (1)..(25): A nucleotide ribose may be modified with 2'-fluoroarabinonucleic acid
  modified_base (1)..(25): A nucleotide may contain a methylene bridge between the 2'-O and 4'-C positions of the ribose
  modified_base (1)..(25): A phosphodiester linkage may be replaced with a non-ionic phosphorothioate linkage
  modified_base (1)..(25): A phosphodiester linkage may be replaced with a non-ionic amide linkage
  ref <308>: DATABASE ACCESSION NUMBER: genbank/MG021310
  ref <309>: DATABASE ENTRY DATE: 2018-03-05
  ref <313>: RELEVANT RESIDUES IN SEQ ID NO: (1285)..(1309)
cggcccagttcagctaagctactat

SEQ ID NO: 75 - DNA, 25 bp, Epstein Barr virus
  modified_base (1)..(25): A nucleotide ribose may be modified with 2'-O-methyl
  modified_base (1)..(25): A nucleotide ribose may be modified with 2'-O-methoxyethyl
  modified_base (1)..(25): A nucleotide ribose may be modified with 2'-fluorine
  modified_base (1)..(25): A nucleotide ribose may be modified with 2'-fluoroarabinonucleic acid
  modified_base (1)..(25): A nucleotide may contain a methylene bridge between the 2'-O and 4'-C positions of the ribose
  modified_base (1)..(25): A phosphodiester linkage may be replaced with a non-ionic phosphorothioate linkage
  modified_base (1)..(25): A phosphodiester linkage may be replaced with a non-ionic amide linkage
  ref <308>: DATABASE ACCESSION NUMBER: genbank/MG021310
  ref <309>: DATABASE ENTRY DATE: 2018-03-05
  ref <313>: RELEVANT RESIDUES IN SEQ ID NO: (1289)..(1313)
ccagttcagctaagctactatgact

SEQ ID NO: 76 - DNA, 25 bp, Epstein Barr virus
  modified_base (1)..(25): A nucleotide ribose may be modified with 2'-O-methyl
  modified_base (1)..(25): A nucleotide ribose may be modified with 2'-O-methoxyethyl
  modified_base (1)..(25): A nucleotide ribose may be modified with 2'-fluorine
  modified_base (1)..(25): A nucleotide ribose may be modified with 2'-fluoroarabinonucleic acid
  modified_base (1)..(25): A nucleotide may contain a methylene bridge between the 2'-O and 4'-C positions of the ribose
  modified_base (1)..(25): A phosphodiester linkage may be replaced with a non-ionic phosphorothioate linkage
  modified_base (1)..(25): A phosphodiester linkage may be replaced with a non-ionic amide linkage
  ref <308>: DATABASE ACCESSION NUMBER: genbank/MG021310
  ref <309>: DATABASE ENTRY DATE: 2018-03-05
  ref <313>: RELEVANT RESIDUES IN SEQ ID NO: (1290)..(1314)
cagttcagctaagctactatgacta

SEQ ID NO: 77 - DNA, 25 bp, Epstein Barr virus
  modified_base (1)..(25): A nucleotide ribose may be modified with 2'-O-methyl
  modified_base (1)..(25): A nucleotide ribose may be modified with 2'-O-methoxyethyl
  modified_base (1)..(25): A nucleotide ribose may be modified with 2'-fluorine
  modified_base (1)..(25): A nucleotide ribose may be modified with 2'-fluoroarabinonucleic acid
  modified_base (1)..(25): A nucleotide may contain a methylene bridge between the 2'-O and 4'-C positions of the ribose
  modified_base (1)..(25): The phosphodiester linkage may be replaced with a non-ionic phosphorothioate linkage
  modified_base (1)..(25): The phosphodiester linkage may be replaced with a non-ionic amide linkage
  ref <308>: DATABASE ACCESSION NUMBER: genbank/AJ507799
  ref <309>: DATABASE ENTRY DATE: 2016-07-26
  ref <313>: RELEVANT RESIDUES IN SEQ ID NO: (42)..(66)
gatggacccaaactcgacttctgaa

SEQ ID NO: 78 - DNA, 25 bp, Epstein Barr virus
  modified_base (1)..(25): A nucleotide ribose may be modified with 2'-O-methyl
  modified_base (1)..(25): A nucleotide ribose may be modified with 2'-O-methoxyethyl
  modified_base (1)..(25): A nucleotide ribose may be modified with 2'-fluorine
  modified_base (1)..(25): A nucleotide ribose may be modified with 2'-fluoroarabinonucleic acid
  modified_base (1)..(25): A phosphodiester linkage may be replaced with a non-ionic phosphorothioate linkage
  modified_base (1)..(25): A phosphodiester linkage may be replaced with a non-ionic amide linkage
  modified_base (1)..(25): A nucleotide may contain a methylene bridge between the 2'-O and 4'-C positions of the ribose
  ref <308>: DATABASE ACCESSION NUMBER: genbank/AJ507799
  ref <309>: DATABASE ENTRY DATE: 2016-07-26
  ref <313>: RELEVANT RESIDUES IN SEQ ID NO: (210)..(234)
acaaggccagctaactgcctatcat

SEQ ID NO: 79 - DNA, 25 bp, Epstein Barr virus
  modified_base (1)..(25): A nucleotide ribose may be modified with 2'-O-methyl
  modified_base (1)..(25): A nucleotide ribose may be modified with 2'-O-methoxyethyl
  modified_base (1)..(25): A nucleotide ribose may be modified with 2'-fluorine
  modified_base (1)..(25): A nucleotide ribose may be modified with 2'-fluoroarabinonucleic acid
  modified_base (1)..(25): A nucleotide may contain a methylene bridge between the 2'-O and 4'-C positions of the ribose
  modified_base (1)..(25): A phosphodiester linkage may be replaced with a non-ionic phosphorothioate linkage
  modified_base (1)..(25): A phosphodiester linkage may be replaced with a non-ionic amide linkage
  ref <308>: DATABASE ACCESSION NUMBER: genbank/AJ507799
  ref <309>: DATABASE ENTRY DATE: 2016-07-26
  ref <313>: RELEVANT RESIDUES IN SEQ ID NO: (316)..(340)
cagctgttcccagtctccgacataa

SEQ ID NO: 80 - DNA, 25 bp, Epstein Barr virus
  modified_base (1)..(25): A nucleotide ribose may be modified with 2'-O-methyl
  modified_base (1)..(25): A nucleotide ribose may be modified with 2'-O-methoxyethyl
  modified_base (1)..(25): A nucleotide ribose may be modified with 2'-fluoroarabinonucleic acid
  modified_base (1)..(25): A nucleotide ribose may be modified with 2'-fluorine
  modified_base (1)..(25): A nucleotide may contain a methylene bridge between the 2'-O and 4'-C positions of the ribose
  modified_base (1)..(25): A phosphodiester linkage may be replaced with a non-ionic phosphorothioate linkage
  modified_base (1)..(25): A phosphodiester linkage may be replaced with a non-ionic amide linkage
  ref <308>: DATABASE ACCESSION NUMBER: genbank/AJ507799
  ref <309>: DATABASE ENTRY DATE: 2016-07-26
  ref <313>: RELEVANT RESIDUES IN SEQ ID NO: (447)..(471)
ccaaggacaacagctagcagacatt

SEQ ID NO: 81 - DNA, 25 bp, Epstein Barr virus
  modified_base (1)..(25): A nucleotide ribose may be modified with 2'-O-methyl
  modified_base (1)..(25): A nucleotide ribose may be modified with 2'-O-methoxyethyl
  modified_base (1)..(25): A nucleotide ribose may be modified with 2'-fluorine
  modified_base (1)..(25): A nucleotide ribose may be modified with 2'-fluoroarabinonucleic acid
  modified_base (1)..(25): A nucleotide may contain a methylene bridge between the 2'-O and 4'-C positions of the ribose
  modified_base (1)..(25): A phosphodiester linkage may be replaced with a non-ionic phosphorothioate linkage
  modified_base (1)..(25): A phosphodiester linkage may be replaced with a non-ionic amide linkage
  ref <308>: DATABASE ACCESSION NUMBER: genbank/AJ507799
  ref <309>: DATABASE ENTRY DATE: 2016-07-26
  ref <313>: RELEVANT RESIDUES IN SEQ ID NO: (519)..(543)
gaaaccacaacagccagaatcggta

SEQ ID NO: 82 - DNA, 25 bp, Epstein Barr virus
  modified_base (1)..(25): A nucleotide ribose may be modified with 2'-O-methyl
  modified_base (1)..(25): A nucleotide ribose may be modified with 2'-O-methoxyethyl
  modified_base (1)..(25): A nucleotide ribose may be modified with 2'-fluorine
  modified_base (1)..(25): A nucleotide ribose may be modified with 2'-fluoroarabinonucleic acid
  modified_base (1)..(25): A nucleotide may contain a methylene bridge between the 2'-O and 4'-C positions of the ribose
  modified_base (1)..(25): A phosphodiester linkage may be replaced with a non-ionic phosphorothioate linkage
  modified_base (1)..(25): A phosphodiester linkage may be replaced with a non-ionic amide linkage
  ref <308>: DATABASE ACCESSION NUMBER: genbank/AJ507799
  ref <309>: DATABASE ENTRY DATE: 2016-07-26
  ref <313>: RELEVANT RESIDUES IN SEQ ID NO: (661)..(685)
gcagctggaggaatgcgattctgaa

SEQ ID NO: 83 - DNA, 25 bp, Epstein Barr virus
  modified_base (1)..(25): A nucleotide ribose may be modified with 2'-O-methyl
  modified_base (1)..(25): A nucleotide ribose may be modified with 2'-O-methoxyethyl
  modified_base (1)..(25): A nucleotide ribose may be modified with 2'-fluorine
  modified_base (1)..(25): A nucleotide ribose may be modified with 2'-fluoroarabinonucleic acid
  modified_base (1)..(25): A nucleotide may contain a methylene bridge between the 2'-O and 4'-C positions of the ribose
  modified_base (1)..(25): A phosphodiester linkage may be replaced with a non-ionic amide linkage
  modified_base (1)..(25): A phosphodiester linkage may be replaced with a non-ionic phosphorothioate linkage
  ref <308>: DATABASE ACCESSION NUMBER: genbank/AJ507799
  ref <309>: DATABASE ENTRY DATE: 2016-07-26
  ref <313>: RELEVANT RESIDUES IN SEQ ID NO: (732)..(756)
gggccaagtttaagcaactgctgca

SEQ ID NO: 84 - DNA, 25 bp, Epstein Barr virus
  modified_base (1)..(25): A nucleotide ribose may be modified with 2'-O-methyl
  modified_base (1)..(25): A nucleotide ribose may be modified with 2'-O-methoxyethyl
  modified_base (1)..(25): A nucleotide ribose may be modified with 2'-fluorine
  modified_base (1)..(25): A nucleotide ribose may be modified with 2'-fluoroarabinonucleic acid
  modified_base (1)..(25): A nucleotide may contain a methylene bridge between the 2'-O and 4'-C positions of the ribose
  modified_base (1)..(25): A phosphodiester linkage may be replaced with a non-ionic amide linkage
  modified_base (1)..(25): A phosphodiester linkage may be replaced with a non-ionic phosphorothioate linkage
  ref <308>: DATABASE ACCESSION NUMBER: genbank/AJ507799
  ref <309>: DATABASE ENTRY DATE: 2016-07-26
  ref <313>: RELEVANT RESIDUES IN SEQ ID NO: (755)..(779)
cagcactaccgtgaggtcagtatat

SEQ ID NO: 85 - DNA, 25 bp, Epstien Barr virus
  modified_base (1)..(25): A nucleotide ribose may be modified with 2'-O-methyl
  modified_base (1)..(25): A nucleotide ribose may be modified with 2'-O-methoxyethyl
  modified_base (1)..(25): A nucleotide ribose may be modified with 2'-fluorine
  modified_base (1)..(25): A nucleotide ribose may be modified with 2'-fluoroarabinonucleic acid
  modified_base (1)..(25): A nucleotide may contain a methylene bridge between the 2'-O and 4'-C positions of the ribose
  modified_base (1)..(25): A phosphodiester linkage may be replaced with a non-ionic phosphorothioate linkage
  modified_base (1)..(25): A phosphodiester linkage may be replaced with a non-ionic amide linkage
  ref <308>: DATABASE ACCESSION NUMBER: genbank/AJ507799
  ref <309>: DATABASE ENTRY DATE: 2016-07-26
  ref <313>: RELEVANT RESIDUES IN SEQ ID NO: (767)..(791)
gaggtcagtatatactaacacgaat

SEQ ID NO: 86 - DNA, 25 bp, Epstein Barr virus
  modified_base (1)..(25): A nucleotide ribose may be modified with 2'-O-methyl
  modified_base (1)..(25): A nucleotide ribose may be modified with 2'-O-methoxyethyl
  modified_base (1)..(25): A nucleotide ribose may be modified with 2'-fluorine
  modified_base (1)..(25): A nucleotide ribose may be modified with 2'-fluoroarabinonucleic acid
  modified_base (1)..(25): A nucleotide may contain a methylene bridge between the 2'-O and 4'-C positions of the ribose
  modified_base (1)..(25): A phosphodiester linkage may be replaced with a non-ionic phosphorothioate linkage
  modified_base (1)..(25): A phosphodiester linkage may be replaced with a non-ionic amide linkage
  ref <308>: DATABASE ACCESSION NUMBER: genbank/AJ507799
  ref <309>: DATABASE ENTRY DATE: 2016-07-26
  ref <313>: RELEVANT RESIDUES IN SEQ ID NO: (1042)..(1066)
aaatatcttcctgtcggctctcttt

SEQ ID NO: 87 - DNA, 25 bp, Epstein Barr virus
  modified_base (1)..(25): A nucleotide ribose may be modified with 2'-O-methyl
  modified_base (1)..(25): A nucleotide ribose may be modified with 2'-fluorine
  modified_base (1)..(25): A nucleotide ribose may be modified with 2'-fluoroarabinonucleic acid
  modified_base (1)..(25): A nucleotide may contain a methylene bridge between the 2'-O and 4'-C positions of the ribose
  modified_base (1)..(25): A nucleotide ribose may be modified with 2'-O-methoxyethyl
  modified_base (1)..(25): A phosphodiester linkage may be replaced with a non-ionic phosphorothioate linkage
  modified_base (1)..(25): A phosphodiester linkage may be replaced with a non-ionic amide linkage
  ref <308>: DATABASE ACCESSION NUMBER: genbank/LN827739
  ref <309>: DATABASE ENTRY DATE: 2015-09-25
  ref <313>: RELEVANT RESIDUES IN SEQ ID NO: (56)..(80)
gcggaatcaggaccatggatgtgaa

SEQ ID NO: 88 - DNA, 25 bp, Epstein Barr virus
  modified_base (1)..(25): A nucleotide ribose may be modified with 2'-O-methyl
  modified_base (1)..(25): A nucleotide ribose may be modified with 2'-fluorine
  modified_base (1)..(25): A nucleotide ribose may be modified with 2'-fluoroarabinonucleic acid
  modified_base (1)..(25): A nucleotide may contain a methylene bridge between the 2'-O and 4'-C positions of the ribose
  modified_base (1)..(25): A phosphodiester linkage may be replaced with a non-ionic phosphorothioate linkage
  modified_base (1)..(25): A phosphodiester linkage may be replaced with a non-ionic amide linkage
  modified_base (1)..(25): A nucleotide ribose may be modified with 2'-O-methoxyethyl
  ref <308>: DATABASE ACCESSION NUMBER: genbank/LN827739
  ref <309>: DATABASE ENTRY DATE: 2015-09-24
  ref <313>: RELEVANT RESIDUES IN SEQ ID NO: (401)..(425)
cggagatctttggcctcgtcctatt

SEQ ID NO: 89 - DNA, 25 bp, Epstein Barr virus
  modified_base (1)..(25): A nucleotide ribose may be modified with 2'-O-methyl
  modified_base (1)..(25): A nucleotide ribose may be modified with 2'-O-methoxyethyl
  modified_base (1)..(25): A nucleotide ribose may be modified with 2'-fluorine
  modified_base (1)..(25): A nucleotide ribose may be modified with 2'-fluoroarabinonucleic acid
  modified_base (1)..(25): A nucleotide may contain a methylene bridge between the 2'-O and 4'-C positions of the ribose
  modified_base (1)..(25): A phosphodiester linkage may be replaced with a non-ionic phosphorothioate linkage
  modified_base (1)..(25): A phosphodiester linkage may be replaced with a non-ionic amide linkage
  ref <308>: DATABASE ACCESSION NUMBER: genbank/LN827739
  ref <309>: DATABASE ENTRY DATE: 2015-09-24
  ref <313>: RELEVANT RESIDUES IN SEQ ID NO: (677)..(701)
cccagtacacttgcgtgcatctcta

SEQ ID NO: 90 - DNA, 25 bp, Epstein Barr virus
  modified_base (1)..(25): A nucleotide ribose may be modified with 2'-O-methyl
  modified_base (1)..(25): A nucleotide ribose may be modified with 2'-fluorine
  modified_base (1)..(25): A nucleotide ribose may be modified with 2'-fluoroarabinonucleic acid
  modified_base (1)..(25): A nucleotide may contain a methylene bridge between the 2'-O and 4'-C positions of the ribose
  modified_base (1)..(25): A phosphodiester linkage may be replaced with a non-ionic phosphorothioate linkage
  modified_base (1)..(25): A phosphodiester linkage may be replaced with a non-ionic amide linkage
  modified_base (1)..(25): A nucleotide ribose may be modified with 2'-O-methoxyethyl
  ref <308>: DATABASE ACCESSION NUMBER: genbank/LN827739
  ref <309>: DATABASE ENTRY DATE: 2015-09-24
  ref <313>: RELEVANT RESIDUES IN SEQ ID NO: (734)..(758)
cccgcatctttatgctggaacacta

SEQ ID NO: 91 - DNA, 25 bp, Epstein Barr virus
  modified_base (1)..(25): A nucleotide ribose may be modified with 2'-O-methyl
  modified_base (1)..(25): A nucleotide ribose may be modified with 2'-fluorine
  modified_base (1)..(25): A nucleotide ribose may be modified with 2'-fluoroarabinonucleic acid
  modified_base (1)..(25): A nucleotide may contain a methylene bridge between the 2'-O and 4'-C positions of the ribose
  modified_base (1)..(25): A phosphodiester linkage may be replaced with a non-ionic phosphorothioate linkage
  modified_base (1)..(25): A phosphodiester linkage may be replaced with a non-ionic amide linkage
  modified_base (1)..(25): A nucleotide ribose may be modified with 2'-O-methoxyethyl
  ref <308>: DATABASE ACCESSION NUMBER: genbannk/LN827739
  ref <309>: DATABASE ENTRY DATE: 2015-09-24
  ref <313>: RELEVANT RESIDUES IN SEQ ID NO: (735)..(759)
ccgcatctttatgctggaacactat

SEQ ID NO: 92 - DNA, 25 bp, Epstein Barr virus
  modified_base (1)..(25): A nucleotide ribose may be modified with 2'-O-methyl
  modified_base (1)..(25): A nucleotide ribose may be modified with 2'-O-methoxyethyl
  modified_base (1)..(25): A nucleotide ribose may be modified with 2'-fluorine
  modified_base (1)..(25): A nucleotide ribose may be modified with 2'-fluoroarabinonucleic acid
  modified_base (1)..(25): A nucleotide may contain a methylene bridge between the 2'-O and 4'-C positions of the ribose
  modified_base (1)..(25): A phosphodiester linkage may be replaced with a non-ionic phosphorothioate linkage
  modified_base (1)..(25): A phosphodiester linkage may be replaced with a non-ionic amide linkage
  ref <308>: DATABASE ACCESSION NUMBER: genbank/ LN827739
  ref <309>: DATABASE ENTRY DATE: 2015-09-24
  ref <313>: RELEVANT RESIDUES IN SEQ ID NO: (1407)..(1431)
gagccaatactatcagaccaccttt

SEQ ID NO: 93 - DNA, 25 bp, Epstein Barr virus
  modified_base (1)..(25): A nucleotide ribose may be modified with 2'-O-methyl
  modified_base (1)..(25): A nucleotide ribose may be modified with 2'-O-methoxyethyl
  modified_base (1)..(25): A nucleotide ribose may be modified with 2'-fluorine
  modified_base (1)..(25): A nucleotide ribose may be modified with 2'-fluoroarabinonucleic acid
  modified_base (1)..(25): A nucleotide may contain a methylene bridge between the 2'-O and 4'-C positions of the ribose
  modified_base (1)..(25): A phosphodiester linkage may be replaced with a non-ionic phosphorothioate linkage
  modified_base (1)..(25): A phosphodiester linkage may be replaced with a non-ionic amide linkage
  ref <308>: DATABASE ACCESSION NUMBER: genbank/LN827739
  ref <309>: DATABASE ENTRY DATE: 2015-09-24
  ref <313>: RELEVANT RESIDUES IN SEQ ID NO: (1556)..(1580)
cagatgccttgagcatgatagacta

SEQ ID NO: 94 - DNA, 25 bp, Epstein Barr virus
  modified_base (1)..(25): A nucleotide ribose may be modified with 2'-O-methyl
  modified_base (1)..(25): A nucleotide ribose may be modified with 2'-O-methoxyethyl
  modified_base (1)..(25): A nucleotide ribose may be modified with 2'-fluorine
  modified_base (1)..(25): A nucleotide ribose may be modified with 2'-fluoroarabinonucleic acid
  modified_base (1)..(25): A nucleotide may contain a methylene bridge between the 2'-O and 4'-C positions of the ribose
  modified_base (1)..(25): A phosphodiester linkage may be replaced with a non-ionic phosphorothioate linkage
  modified_base (1)..(25): A phosphodiester linkage may be replaced with a non-ionic amide linkage
  ref <308>: DATABASE ACCESSION NUMBER: genbank/LN827739
  ref <309>: DATABASE ENTRY DATE: 2015-09-24
  ref <313>: RELEVANT RESIDUES IN SEQ ID NO: (1634)..(1658)
cgtctgtgctaaatctgctggaatt

SEQ ID NO: 95 - DNA, 25 bp, Epstein Barr virus
  modified_base (1)..(25): A nucleotide ribose may be modified with 2'-O-methyl
  modified_base (1)..(25): A nucleotide ribose may be modified with 2'-O-methoxyethyl
  modified_base (1)..(25): A nucleotide ribose may be modified with 2'-fluorine
  modified_base (1)..(25): A nucleotide ribose may be modified with 2'-fluoroarabinonucleic acid
  modified_base (1)..(25): A nucleotide may contain a methylene bridge between the 2'-O and 4'-C positions of the ribose
  modified_base (1)..(25): A phosphodiester linkage may be replaced with a non-ionic phosphorothioate linkage
  modified_base (1)..(25): A phosphodiester linkage may be replaced with a non-ionic amide linkage
  ref <308>: DATABASE ACCESSION NUMBER: genbank/LN827739
  ref <309>: DATABASE ENTRY DATE: 2015-09-24
  ref <313>: RELEVANT RESIDUES IN SEQ ID NO: (1859)..(1883)
ccggtgctaagatgctggctgaaat

SEQ ID NO: 96 - DNA, 25 bp, Epstein Barr virus
  modified_base (1)..(25): A nucleotide ribose may be modified with 2'-O-methyl
  modified_base (1)..(25): A nucleotide ribose may be modified with 2'-O-methoxyethyl
  modified_base (1)..(25): A nucleotide ribose may be modified with 2'-fluorine
  modified_base (1)..(25): A nucleotide ribose may be modified with 2'-fluoroarabinonucleic acid
  modified_base (1)..(25): A nucleotide may contain a methylene bridge between the 2'-O and 4'-C positions of the ribose
  modified_base (1)..(25): A phosphodiester linkage may be replaced with a non-ionic phosphorothioate linkage
  modified_base (1)..(25): A phosphodiester linkage may be replaced with a non-ionic amide linkage
  ref <308>: DATABASE ACCESSION NUMBER: genbank/LN827739
  ref <309>: DATABASE ENTRY DATE: 2015-09-24
  ref <313>: RELEVANT RESIDUES IN SEQ ID NO: (1860)..(1884)
cggtgctaagatgctggctgaaatt

SEQ ID NO: 97 - DNA, 25 bp, Epstein Barr virus
  modified_base (1)..(25): A nucleotide ribose may be modified with 2'-O-methyl
  modified_base (1)..(25): A nucleotide ribose may be modified with 2'-O-methoxyethyl
  modified_base (1)..(25): A nucleotide ribose may be modified with 2'-fluorine
  modified_base (1)..(25): A nucleotide ribose may be modified with 2'-fluoroarabinonucleic acid
  modified_base (1)..(25): A nucleotide may contain a methylene bridge between the 2'-O and 4'-C positions of the ribose
  modified_base (1)..(25): A phosphodiester linkage may be replaced with a non-ionic phosphorothioate linkage
  modified_base (1)..(25): A phosphodiester linkage may be replaced with a non-ionic amide linkage
  ref <308>: DATABASE ACCESSION NUMBER: genbank/MG021307
  ref <309>: DATABASE ENTRY DATE: 2018-03-05
  ref <313>: RELEVANT RESIDUES IN SEQ ID NO: (84)..(108)
ccacagaaactacacggcctcaaag

SEQ ID NO: 98 - DNA, 25 bp, Epstein Barr virus
  modified_base (1)..(25): A nucleotide ribose may be modified with 2'-O-methyl
  modified_base (1)..(25): A nucleotide ribose may be modified with 2'-O-methoxyethyl
  modified_base (1)..(25): A nucleotide ribose may be modified with 2'-fluorine
  modified_base (1)..(25): A nucleotide ribose may be modified with 2'-fluoroarabinonucleic acid
  modified_base (1)..(25): A nucleotide may contain a methylene bridge between the 2'-O and 4'-C positions of the ribose
  modified_base (1)..(25): A phosphodiester linkage may be replaced with a non-ionic phosphorothioate linkage
  modified_base (1)..(25): A phosphodiester linkage may be replaced with a non-ionic amide linkage
  ref <308>: DATABASE ACCESSION NUMBER: genbank/MG021307
  ref <309>: DATABASE ENTRY DATE: 2018-03-05
  ref <313>: RELEVANT RESIDUES IN SEQ ID NO: (154)..(178)
cgctcagagctgggaagaatggaaa

SEQ ID NO: 99 - DNA, 25 bp, Epstein Barr virus
  modified_base (1)..(25): A nucleotide ribose may be modified with 2'-O-methyl
  modified_base (1)..(25): A nucleotide ribose may be modified with 2'-O-methoxyethyl
  modified_base (1)..(25): A nucleotide ribose may be modified with 2'-fluorine
  modified_base (1)..(25): A nucleotide ribose may be modified with 2'-fluoroarabinonucleic acid
  modified_base (1)..(25): A nucleotide may contain a methylene bridge between the 2'-O and 4'-C positions of the ribose
  modified_base (1)..(25): A phosphodiester linkage may be replaced with a non-ionic phosphorothioate linkage
  modified_base (1)..(25): A phosphodiester linkage may be replaced with a non-ionic amide linkage
  ref <308>: DATABASE ACCESSION NUMBER: genbank/MG021307
  ref <309>: DATABASE ENTRY DATE: 2018-03-05
  ref <313>: RELEVANT RESIDUES IN SEQ ID NO: (220)..(244)
agacatggtgtagacagatcccatt

SEQ ID NO: 100 - DNA, 25 bp, Epstein Barr virus
  modified_base (1)..(25): A nucleotide ribose may be modified with 2'-O-methyl
  modified_base (1)..(25): A nucleotide ribose may be modified with 2'-O-methoxyethyl
  modified_base (1)..(25): A nucleotide ribose may be modified with 2'-fluorine
  modified_base (1)..(25): A nucleotide ribose may be modified with 2'-fluoroarabinonucleic acid
  modified_base (1)..(25): A nucleotide may contain a methylene bridge between the 2'-O and 4'-C positions of the ribose
  modified_base (1)..(25): A phosphodiester linkage may be replaced with a non-ionic phosphorothioate linkage
  modified_base (1)..(25): A phosphodiester linkage may be replaced with a non-ionic amide linkage
  ref <308>: DATABASE ACCESSION NUMBER: genbank/MG021307
  ref <309>: DATABASE ENTRY DATE: 2018-03-05
  ref <313>: RELEVANT RESIDUES IN SEQ ID NO: (323)..(347)
ccatacatgtctcagaggccgtgtt

SEQ ID NO: 101 - DNA, 25 bp, Epstein Barr virus
  modified_base (1)..(25): A phosphodiester linkage may be replaced with a non-ionic amide linkage
  modified_base (1)..(25): A nucleotide ribose may be modified with 2'-O-methoxyethyl
  modified_base (1)..(25): A phosphodiester linkage may be replaced with a non-ionic phosphorothioate linkage
  modified_base (1)..(25): A nucleotide may contain a methylene bridge between the 2'-O and 4'-C positions of the ribose
  modified_base (1)..(25): A nucleotide ribose may be modified with 2'-fluoroarabinonucleic acid
  modified_base (1)..(25): A nucleotide ribose may be modified with 2'-fluorine
  modified_base (1)..(25): A nucleotide ribose may be modified with 2'-O-methyl
  ref <308>: DATABASE ACCESSION NUMBER: genbank/	MG021307
  ref <309>: DATABASE ENTRY DATE: 2018-03-05
  ref <313>: RELEVANT RESIDUES IN SEQ ID NO: (427)..(451)
tctcactgcgagatctgcatcaata

SEQ ID NO: 102 - DNA, 25 bp, Epstein Barr virus
  modified_base (1)..(25): A nucleotide ribose may be modified with 2'-O-methyl
  modified_base (1)..(25): A nucleotide ribose may be modified with 2'-O-methoxyethyl
  modified_base (1)..(25): A nucleotide ribose may be modified with 2'-fluorine
  modified_base (1)..(25): A nucleotide ribose may be modified with 2'-fluoroarabinonucleic acid
  modified_base (1)..(25): A nucleotide may contain a methylene bridge between the 2'-O and 4'-C positions of the ribose
  modified_base (1)..(25): A phosphodiester linkage may be replaced with a non-ionic phosphorothioate linkage
  modified_base (1)..(25): A phosphodiester linkage may be replaced with a non-ionic amide linkage
  ref <308>: DATABASE ACCESSION NUMBER: genbank/MG021307
  ref <309>: DATABASE ENTRY DATE: 2018-03-05
  ref <313>: RELEVANT RESIDUES IN SEQ ID NO: (440)..(464)
tctgcatcaataggtcccaggttca

SEQ ID NO: 103 - DNA, 25 bp, Epstein Barr virus
  modified_base (1)..(25): A phosphodiester linkage may be replaced with a non-ionic amide linkage
  modified_base (1)..(25): A nucleotide ribose may be modified with 2'-O-methoxyethyl
  modified_base (1)..(25): A phosphodiester linkage may be replaced with a non-ionic phosphorothioate linkage
  modified_base (1)..(25): A nucleotide may contain a methylene bridge between the 2'-O and 4'-C positions of the ribose
  modified_base (1)..(25): A nucleotide ribose may be modified with 2'-fluoroarabinonucleic acid
  modified_base (1)..(25): A nucleotide ribose may be modified with 2'-fluorine
  modified_base (1)..(25): A nucleotide ribose may be modified with 2'-O-methyl
  ref <308>: DATABASE ACCESSION NUMBER: genbank/MG021307
  ref <309>: DATABASE ENTRY DATE: 2018-03-05
  ref <313>: RELEVANT RESIDUES IN SEQ ID NO: (457)..(481)
caggttcatgtgcctcaggagttta

SEQ ID NO: 104 - DNA, 25 bp, Epstein Barr virus
  modified_base (1)..(25): A nucleotide ribose may be modified with 2'-O-methyl
  modified_base (1)..(25): A nucleotide ribose may be modified with 2'-O-methoxyethyl
  modified_base (1)..(25): A nucleotide ribose may be modified with 2'-fluorine
  modified_base (1)..(25): A nucleotide ribose may be modified with 2'-fluoroarabinonucleic acid
  modified_base (1)..(25): A nucleotide may contain a methylene bridge between the 2'-O and 4'-C positions of the ribose
  modified_base (1)..(25): A phosphodiester linkage may be replaced with a non-ionic phosphorothioate linkage
  modified_base (1)..(25): A phosphodiester linkage may be replaced with a non-ionic amide linkage
  ref <308>: DATABASE ACCESSION NUMBER: genbank/MG021307
  ref <309>: DATABASE ENTRY DATE: 2018-03-05
  ref <313>: RELEVANT RESIDUES IN SEQ ID NO: (497)..(521)
cacagtatatgagaaggctgtcaat

SEQ ID NO: 105 - DNA, 25 bp, Epstein Barr virus
  modified_base (1)..(25): A nucleotide ribose may be modified with 2'-O-methyl
  modified_base (1)..(25): A nucleotide ribose may be modified with 2'-O-methoxyethyl
  modified_base (1)..(25): A nucleotide ribose may be modified with 2'-fluorine
  modified_base (1)..(25): A nucleotide ribose may be modified with 2'-fluoroarabinonucleic acid
  modified_base (1)..(25): A nucleotide may contain a methylene bridge between the 2'-O and 4'-C positions of the ribose
  modified_base (1)..(25): A phosphodiester linkage may be replaced with a non-ionic phosphorothioate linkage
  modified_base (1)..(25): A phosphodiester linkage may be replaced with a non-ionic amide linkage
  ref <308>: DATABASE ACCESSION NUMBER: genbank/MG021307
  ref <309>: DATABASE ENTRY DATE: 2018-03-05
  ref <313>: RELEVANT RESIDUES IN SEQ ID NO: (825)..(849)
cacagtatatgagaaggctgtcaat

SEQ ID NO: 106 - DNA, 25 bp, Epstein Barr virus
  modified_base (1)..(25): A nucleotide ribose may be modified with 2'-O-methyl
  modified_base (1)..(25): A nucleotide ribose may be modified with 2'-O-methoxyethyl
  modified_base (1)..(25): A nucleotide ribose may be modified with 2'-fluorine
  modified_base (1)..(25): A nucleotide ribose may be modified with 2'-fluoroarabinonucleic acid
  modified_base (1)..(25): A nucleotide may contain a methylene bridge between the 2'-O and 4'-C positions of the ribose
  modified_base (1)..(25): A phosphodiester linkage may be replaced with a non-ionic phosphorothioate linkage
  modified_base (1)..(25): A phosphodiester linkage may be replaced with a non-ionic amide linkage
  ref <308>: DATABASE ACCESSION NUMBER: genbank/MG021307
  ref <309>: DATABASE ENTRY DATE: 2018-03-05
  ref <313>: RELEVANT RESIDUES IN SEQ ID NO: (901)..(925)
gagctgcgcctacagatcatcaact

SEQ ID NO: 107 - DNA, 25 bp, Epstein Barr virus
  modified_base (1)..(25): A nucleotide ribose may be modified with 2'-O-methyl
  modified_base (1)..(25): A nucleotide ribose may be modified with 2'-O-methoxyethyl
  modified_base (1)..(25): A nucleotide ribose may be modified with 2'-fluorine
  modified_base (1)..(25): A nucleotide ribose may be modified with 2'-fluoroarabinonucleic acid
  modified_base (1)..(25): A nucleotide may contain a methylene bridge between the 2'-O and 4'-C positions of the ribose
  modified_base (1)..(25): A phosphodiester linkage may be replaced with a non-ionic phosphorothioate linkage
  modified_base (1)..(25): A phosphodiester linkage may be replaced with a non-ionic amide linkage
  ref <308>: DATABASE ACCESSION NUMBER: genbank/LN827739
  ref <309>: DATABASE ENTRY DATE: 2015-09-24
  ref <313>: RELEVANT RESIDUES IN SEQ ID NO: (259)..(283)
gacaacattattccctactcgttta

SEQ ID NO: 108 - DNA, 25 bp, Epstein Barr virus
  modified_base (1)..(25): A nucleotide ribose may be modified with 2'-O-methyl
  modified_base (1)..(25): A nucleotide ribose may be modified with 2'-O-methoxyethyl
  modified_base (1)..(25): A nucleotide ribose may be modified with 2'-fluorine
  modified_base (1)..(25): A nucleotide ribose may be modified with 2'-fluoroarabinonucleic acid
  modified_base (1)..(25): A nucleotide may contain a methylene bridge between the 2'-O and 4'-C positions of the ribose
  modified_base (1)..(25): A phosphodiester linkage may be replaced with a non-ionic phosphorothioate linkage
  modified_base (1)..(25): A phosphodiester linkage may be replaced with a non-ionic amide linkage
  ref <308>: DATABASE ACCESSION NUMBER: genbank/LN827739
  ref <309>: DATABASE ENTRY DATE: 2015-09-24
  ref <313>: RELEVANT RESIDUES IN SEQ ID NO: (370)..(394)
aagttctccgttgagagctacgaaa

SEQ ID NO: 109 - DNA, 25 bp, Epstein Barr virus
  modified_base (1)..(25): A phosphodiester linkage may be replaced with a non-ionic amide linkage
  modified_base (1)..(25): A phosphodiester linkage may be replaced with a non-ionic phosphorothioate linkage
  modified_base (1)..(25): A nucleotide may contain a methylene bridge between the 2'-O and 4'-C positions of the ribose
  modified_base (1)..(25): A nucleotide ribose may be modified with 2'-fluoroarabinonucleic acid
  modified_base (1)..(25): A nucleotide ribose may be modified with 2'-fluorine
  modified_base (1)..(25): A nucleotide ribose may be modified with 2'-O-methyl
  ref <308>: DATABASE ACCESSION NUMBER: genbank/LN827739
  ref <309>: DATABASE ENTRY DATE: 2015-09-24
  ref <313>: RELEVANT RESIDUES IN SEQ ID NO: (400)..(424)
cagatggataccatctaccagtgct

SEQ ID NO: 110 - DNA, 25 bp, Epstein Barr virus
  modified_base (1)..(25): A nucleotide ribose may be modified with 2'-O-methyl
  modified_base (1)..(25): A nucleotide ribose may be modified with 2'-O-methoxyethyl
  modified_base (1)..(25): A nucleotide ribose may be modified with 2'-fluorine
  modified_base (1)..(25): A nucleotide ribose may be modified with 2'-fluoroarabinonucleic acid
  modified_base (1)..(25): A nucleotide may contain a methylene bridge between the 2'-O and 4'-C positions of the ribose
  modified_base (1)..(25): A phosphodiester linkage may be replaced with a non-ionic phosphorothioate linkage
  modified_base (1)..(25): A phosphodiester linkage may be replaced with a non-ionic amide linkage
  ref <308>: DATABASE ACCESSION NUMBER: genbank/LN827739
  ref <309>: DATABASE ENTRY DATE: 2015-09-24
  ref <313>: RELEVANT RESIDUES IN SEQ ID NO: (476)..(500)
gcgacggagttaacatcaccgtcaa

SEQ ID NO: 111 - DNA, 25 bp, Epstein Barr virus
  modified_base (1)..(25): A phosphodiester linkage may be replaced with a non-ionic amide linkage
  modified_base (1)..(25): A phosphodiester linkage may be replaced with a non-ionic phosphorothioate linkage
  modified_base (1)..(25): A nucleotide may contain a methylene bridge between the 2'-O and 4'-C positions of the ribose
  modified_base (1)..(25): A nucleotide ribose may be modified with 2'-fluoroarabinonucleic acid
  modified_base (1)..(25): A nucleotide ribose may be modified with 2'-fluorine
  modified_base (1)..(25): A nucleotide ribose may be modified with 2'-O-methyl
  modified_base (1)..(25): A nucleotide ribose may be modified with 2'-O-methoxyethyl
  ref <308>: DATABASE ACCESSION NUMBER: genbank/LN827739
  ref <309>: DATABASE ENTRY DATE: 2018-09-24
  ref <313>: RELEVANT RESIDUES IN SEQ ID NO: (482)..(506)
gagttaacatcaccgtcaacctaaa

SEQ ID NO: 112 - DNA, 25 bp, Epstein Barr virus
  modified_base (1)..(25): A nucleotide ribose may be modified with 2'-O-methyl
  modified_base (1)..(25): A nucleotide ribose may be modified with 2'-O-methoxyethyl
  modified_base (1)..(25): A nucleotide ribose may be modified with 2'-fluorine
  modified_base (1)..(25): A nucleotide ribose may be modified with 2'-fluoroarabinonucleic acid
  modified_base (1)..(25): A nucleotide may contain a methylene bridge between the 2'-O and 4'-C positions of the ribose
  modified_base (1)..(25): A phosphodiester linkage may be replaced with a non-ionic phosphorothioate linkage
  modified_base (1)..(25): A phosphodiester linkage may be replaced with a non-ionic amide linkage
  ref <308>: DATABASE ACCESSION NUMBER: genbank/LN827739
  ref <309>: DATABASE ENTRY DATE: 2015-09-24
  ref <313>: RELEVANT RESIDUES IN SEQ ID NO: (571)..(595)
cccgggtggttgatatggacttaca

SEQ ID NO: 113 - DNA, 25 bp, Epstein Barr virus
  modified_base (1)..(25): A phosphodiester linkage may be replaced with a non-ionic amide linkage
  modified_base (1)..(25): A phosphodiester linkage may be replaced with a non-ionic phosphorothioate linkage
  modified_base (1)..(25): A nucleotide may contain a methylene bridge between the 2'-O and 4'-C positions of the ribose
  modified_base (1)..(25): A nucleotide ribose may be modified with 2'-fluoroarabinonucleic acid
  modified_base (1)..(25): A nucleotide ribose may be modified with 2'-fluorine
  modified_base (1)..(25): A nucleotide ribose may be modified with 2'-O-methoxyethyl
  modified_base (1)..(25): A nucleotide ribose may be modified with 2'-O-methyl
  ref <308>: DATABASE ACCESSION NUMBER: enbank/LN827739
  ref <309>: DATABASE ENTRY DATE: 2015-09-24
  ref <313>: RELEVANT RESIDUES IN SEQ ID NO: (601)..(625)
agaactaccgtcaactgcctgataa

SEQ ID NO: 114 - DNA, 25 bp, Epstein Barr virus
  modified_base (1)..(25): A nucleotide ribose may be modified with 2'-O-methyl
  modified_base (1)..(25): A nucleotide ribose may be modified with 2'-O-methoxyethyl
  modified_base (1)..(25): A nucleotide ribose may be modified with 2'-fluorine
  modified_base (1)..(25): A nucleotide ribose may be modified with 2'-fluoroarabinonucleic acid
  modified_base (1)..(25): A nucleotide may contain a methylene bridge between the 2'-O and 4'-C positions of the ribose
  modified_base (1)..(25): A phosphodiester linkage may be replaced with a non-ionic phosphorothioate linkage
  modified_base (1)..(25): A phosphodiester linkage may be replaced with a non-ionic amide linkage
  ref <308>: DATABASE ACCESSION NUMBER: enbank/LN827739
  ref <309>: DATABASE ENTRY DATE: 2015-09-24
  ref <313>: RELEVANT RESIDUES IN SEQ ID NO: (2019)..(2043)
cctgcggaaggatttggacaatgca

SEQ ID NO: 115 - DNA, 25 bp, Epstein Barr virus
  modified_base (1)..(25): A phosphodiester linkage may be replaced with a non-ionic amide linkage
  modified_base (1)..(25): A phosphodiester linkage may be replaced with a non-ionic phosphorothioate linkage
  modified_base (1)..(25): A nucleotide may contain a methylene bridge between the 2'-O and 4'-C positions of the ribose
  modified_base (1)..(25): A nucleotide ribose may be modified with 2'-fluoroarabinonucleic acid
  modified_base (1)..(25): A nucleotide ribose may be modified with 2'-fluorine
  modified_base (1)..(25): A nucleotide ribose may be modified with 2'-O-methoxyethyl
  modified_base (1)..(25): A nucleotide ribose may be modified with 2'-O-methyl
  ref <308>: DATABASE ACCESSION NUMBER: genbank/LN827739
  ref <309>: DATABASE ENTRY DATE: 2015-09-24
  ref <313>: RELEVANT RESIDUES IN SEQ ID NO: (2042)..(2066)
cagtgtcaaacggcagaaatcaatt

SEQ ID NO: 116 - DNA, 25 bp, Epstein Barr virus
  modified_base (1)..(25): A nucleotide ribose may be modified with 2'-O-methyl
  modified_base (1)..(25): A nucleotide ribose may be modified with 2'-O-methoxyethyl
  modified_base (1)..(25): A nucleotide ribose may be modified with 2'-fluorine
  modified_base (1)..(25): A nucleotide ribose may be modified with 2'-fluoroarabinonucleic acid
  modified_base (1)..(25): A nucleotide may contain a methylene bridge between the 2'-O and 4'-C positions of the ribose
  modified_base (1)..(25): A phosphodiester linkage may be replaced with a non-ionic phosphorothioate linkage
  modified_base (1)..(25): A phosphodiester linkage may be replaced with a non-ionic amide linkage
  ref <308>: DATABASE ACCESSION NUMBER: genbank/LN827739
  ref <309>: DATABASE ENTRY DATE: 2015-09-24
  ref <313>: RELEVANT RESIDUES IN SEQ ID NO: (2347)..(2371)
ggtccaggcattaatcccattagta

SEQ ID NO: 117 - DNA, 25 bp, Epstein Barr virus
  modified_base (1)..(25): A phosphodiester linkage may be replaced with a non-ionic amide linkage
  modified_base (1)..(25): A phosphodiester linkage may be replaced with a non-ionic phosphorothioate linkage
  modified_base (1)..(25): A nucleotide may contain a methylene bridge between the 2'-O and 4'-C positions of the ribose
  modified_base (1)..(25): A nucleotide ribose may be modified with 2'-fluoroarabinonucleic acid
  modified_base (1)..(25): A nucleotide ribose may be modified with 2'-fluorine
  modified_base (1)..(25): A nucleotide ribose may be modified with 2'-O-methoxyethyl
  modified_base (1)..(25): A nucleotide ribose may be modified with 2'-O-methyl
  ref <308>: DATABASE ACCESSION NUMBER: genbank/MG021306
  ref <309>: DATABASE ENTRY DATE: 2018-03-05
  ref <313>: RELEVANT RESIDUES IN SEQ ID NO: (15)..(39)
gagactctcccgaactagcagcatt

SEQ ID NO: 118 - DNA, 25 bp, Epstein Barr virus
  modified_base (1)..(25): A nucleotide ribose may be modified with 2'-O-methyl
  modified_base (1)..(25): A nucleotide ribose may be modified with 2'-O-methoxyethyl
  modified_base (1)..(25): A nucleotide ribose may be modified with 2'-fluorine
  modified_base (1)..(25): A nucleotide ribose may be modified with 2'-fluoroarabinonucleic acid
  modified_base (1)..(25): A nucleotide may contain a methylene bridge between the 2'-O and 4'-C positions of the ribose
  modified_base (1)..(25): A phosphodiester linkage may be replaced with a non-ionic phosphorothioate linkage
  modified_base (1)..(25): A phosphodiester linkage may be replaced with a non-ionic amide linkage
  ref <308>: DATABASE ACCESSION NUMBER: genbank/MG021306
  ref <309>: DATABASE ENTRY DATE: 2018-03-05
  ref <313>: RELEVANT RESIDUES IN SEQ ID NO: (16)..(40)
agactctcccgaactagcagcattt

SEQ ID NO: 119 - DNA, 25 bp, Epstein Barr virus
  modified_base (1)..(25): A phosphodiester linkage may be replaced with a non-ionic amide linkage
  modified_base (1)..(25): A phosphodiester linkage may be replaced with a non-ionic phosphorothioate linkage
  modified_base (1)..(25): A nucleotide may contain a methylene bridge between the 2'-O and 4'-C positions of the ribose
  modified_base (1)..(25): A nucleotide ribose may be modified with 2'-fluoroarabinonucleic acid
  modified_base (1)..(25): A nucleotide ribose may be modified with 2'-fluorine
  modified_base (1)..(25): A nucleotide ribose may be modified with 2'-O-methoxyethyl
  modified_base (1)..(25): A nucleotide ribose may be modified with 2'-O-methyl
  ref <308>: DATABASE ACCESSION NUMBER: genbank/MG021306
  ref <309>: DATABASE ENTRY DATE: 2018-03-05
  ref <313>: RELEVANT RESIDUES IN SEQ ID NO: (139)..(163)
gaacactccacagatggagagattt

SEQ ID NO: 120 - DNA, 25 bp, Epstein Barr virus
  modified_base (1)..(25): A nucleotide ribose may be modified with 2'-O-methyl
  modified_base (1)..(25): A nucleotide ribose may be modified with 2'-O-methoxyethyl
  modified_base (1)..(25): A nucleotide ribose may be modified with 2'-fluorine
  modified_base (1)..(25): A nucleotide ribose may be modified with 2'-fluoroarabinonucleic acid
  modified_base (1)..(25): A nucleotide may contain a methylene bridge between the 2'-O and 4'-C positions of the ribose
  modified_base (1)..(25): A phosphodiester linkage may be replaced with a non-ionic phosphorothioate linkage
  modified_base (1)..(25): A phosphodiester linkage may be replaced with a non-ionic amide linkage
  ref <308>: DATABASE ACCESSION NUMBER: genbank/MG021306
  ref <309>: DATABASE ENTRY DATE: 2018-03-05
  ref <313>: RELEVANT RESIDUES IN SEQ ID NO: (147)..(171)
cacagatggagagatttcatcctca

SEQ ID NO: 121 - DNA, 25 bp, Epstein Barr virus
  modified_base (1)..(25): A phosphodiester linkage may be replaced with a non-ionic amide linkage
  modified_base (1)..(25): A phosphodiester linkage may be replaced with a non-ionic phosphorothioate linkage
  modified_base (1)..(25): A nucleotide may contain a methylene bridge between the 2'-O and 4'-C positions of the ribose
  modified_base (1)..(25): A nucleotide ribose may be modified with 2'-fluoroarabinonucleic acid
  modified_base (1)..(25): A nucleotide ribose may be modified with 2'-fluorine
  modified_base (1)..(25): A nucleotide ribose may be modified with 2'-O-methoxyethyl
  modified_base (1)..(25): A nucleotide ribose may be modified with 2'-O-methyl
  ref <308>: DATABASE ACCESSION NUMBER: genbank/MG021306
  ref <309>: DATABASE ENTRY DATE: 2018-03-05
  ref <313>: RELEVANT RESIDUES IN SEQ ID NO: (248)..(272)
cggcatcgtttgtgattcccagaaa

SEQ ID NO: 122 - DNA, 25 bp, Epstein Barr virus
  modified_base (1)..(25): A nucleotide ribose may be modified with 2'-O-methyl
  modified_base (1)..(25): A nucleotide ribose may be modified with 2'-O-methoxyethyl
  modified_base (1)..(25): A nucleotide ribose may be modified with 2'-fluorine
  modified_base (1)..(25): A nucleotide ribose may be modified with 2'-fluoroarabinonucleic acid
  modified_base (1)..(25): A nucleotide may contain a methylene bridge between the 2'-O and 4'-C positions of the ribose
  modified_base (1)..(25): A phosphodiester linkage may be replaced with a non-ionic phosphorothioate linkage
  modified_base (1)..(25): A phosphodiester linkage may be replaced with a non-ionic amide linkage
  ref <308>: DATABASE ACCESSION NUMBER: genbank/MG021306
  ref <309>: DATABASE ENTRY DATE: 2018-03-05
  ref <313>: RELEVANT RESIDUES IN SEQ ID NO: (626)..(650)
cgtggtttgacatgagtctggttaa

SEQ ID NO: 123 - DNA, 25 bp, Epstein Barr virus
  modified_base (1)..(25): A phosphodiester linkage may be replaced with a non-ionic amide linkage
  modified_base (1)..(25): A phosphodiester linkage may be replaced with a non-ionic phosphorothioate linkage
  modified_base (1)..(25): A nucleotide may contain a methylene bridge between the 2'-O and 4'-C positions of the ribose
  modified_base (1)..(25): A nucleotide ribose may be modified with 2'-fluoroarabinonucleic acid
  modified_base (1)..(25): A nucleotide ribose may be modified with 2'-fluorine
  modified_base (1)..(25): A nucleotide ribose may be modified with 2'-O-methoxyethyl
  modified_base (1)..(25): A nucleotide ribose may be modified with 2'-O-methyl
  ref <308>: DATABASE ACCESSION NUMBER: genbank/MG021306
  ref <309>: DATABASE ENTRY DATE: 2018-03-05
  ref <313>: RELEVANT RESIDUES IN SEQ ID NO: (1069)..(1093)
cctaacacgcgagactacaactttg

SEQ ID NO: 124 - DNA, 25 bp, Epstein Barr virus
  modified_base (1)..(25): A nucleotide ribose may be modified with 2'-O-methyl
  modified_base (1)..(25): A nucleotide ribose may be modified with 2'-O-methoxyethyl
  modified_base (1)..(25): A nucleotide ribose may be modified with 2'-fluorine
  modified_base (1)..(25): A nucleotide ribose may be modified with 2'-fluoroarabinonucleic acid
  modified_base (1)..(25): A nucleotide may contain a methylene bridge between the 2'-O and 4'-C positions of the ribose
  modified_base (1)..(25): A phosphodiester linkage may be replaced with a non-ionic phosphorothioate linkage
  modified_base (1)..(25): A phosphodiester linkage may be replaced with a non-ionic amide linkage
  ref <308>: DATABASE ACCESSION NUMBER: genbank/MG021306
  ref <309>: DATABASE ENTRY DATE: 2018-03-05
  ref <313>: RELEVANT RESIDUES IN SEQ ID NO: (1213)..(1237)
ccagcctacattaacgccaactgca

SEQ ID NO: 125 - DNA, 25 bp, Epstein Barr virus
  modified_base (1)..(25): A phosphodiester linkage may be replaced with a non-ionic amide linkage
  modified_base (1)..(25): A phosphodiester linkage may be replaced with a non-ionic phosphorothioate linkage
  modified_base (1)..(25): A nucleotide may contain a methylene bridge between the 2'-O and 4'-C positions of the ribose
  modified_base (1)..(25): A nucleotide ribose may be modified with 2'-fluoroarabinonucleic acid
  modified_base (1)..(25): A nucleotide ribose may be modified with 2'-fluorine
  modified_base (1)..(25): A nucleotide ribose may be modified with 2'-O-methoxyethyl
  modified_base (1)..(25): A nucleotide ribose may be modified with 2'-O-methyl
  ref <308>: DATABASE ACCESSION NUMBER: genbank/MG021306
  ref <309>: DATABASE ENTRY DATE: 2018-03-05
  ref <313>: RELEVANT RESIDUES IN SEQ ID NO: (1236)..(1260)
cagacggagacacgatgaagttgaa

SEQ ID NO: 126 - DNA, 25 bp, Epstein Barr virus
  modified_base (1)..(25): A nucleotide ribose may be modified with 2'-O-methyl
  modified_base (1)..(25): A nucleotide ribose may be modified with 2'-O-methoxyethyl
  modified_base (1)..(25): A nucleotide ribose may be modified with 2'-fluorine
  modified_base (1)..(25): A nucleotide ribose may be modified with 2'-fluoroarabinonucleic acid
  modified_base (1)..(25): A nucleotide may contain a methylene bridge between the 2'-O and 4'-C positions of the ribose
  modified_base (1)..(25): A phosphodiester linkage may be replaced with a non-ionic phosphorothioate linkage
  modified_base (1)..(25): A phosphodiester linkage may be replaced with a non-ionic amide linkage
  ref <308>: DATABASE ACCESSION NUMBER: genbank/MG021306
  ref <309>: DATABASE ENTRY DATE: 2018-03-05
  ref <313>: RELEVANT RESIDUES IN SEQ ID NO: (1252)..(1276)
gaagttgaattcctgggccactaca

SEQ ID NO: 127 - DNA, 25 bp, Epstein Barr virus
  modified_base (1)..(25): A phosphodiester linkage may be replaced with a non-ionic amide linkage
  modified_base (1)..(25): A phosphodiester linkage may be replaced with a non-ionic phosphorothioate linkage
  modified_base (1)..(25): A nucleotide may contain a methylene bridge between the 2'-O and 4'-C positions of the ribose
  modified_base (1)..(25): A nucleotide ribose may be modified with 2'-fluoroarabinonucleic acid
  modified_base (1)..(25): A nucleotide ribose may be modified with 2'-fluorine
  modified_base (1)..(25): A nucleotide ribose may be modified with 2'-O-methoxyethyl
  modified_base (1)..(25): A nucleotide ribose may be modified with 2'-O-methyl
  ref <308>: DATABASE ACCESSION NUMBER: genbank/MG021307
  ref <309>: DATABASE ENTRY DATE: 2018-03-05
  ref <313>: RELEVANT RESIDUES IN SEQ ID NO: (47)..(71)
tccatgagctttacctgaaacacta

SEQ ID NO: 128 - DNA, 25 bp, Epstein Barr virus
  modified_base (1)..(25): A nucleotide ribose may be modified with 2'-O-methoxyethyl
  modified_base (1)..(25): A nucleotide ribose may be modified with 2'-O-methyl
  modified_base (1)..(25): A nucleotide ribose may be modified with 2'-fluorine
  modified_base (1)..(25): A nucleotide ribose may be modified with 2'-fluoroarabinonucleic acid
  modified_base (1)..(25): A nucleotide may contain a methylene bridge between the 2'-O and 4'-C positions of the ribose
  modified_base (1)..(25): A phosphodiester linkage may be replaced with a non-ionic phosphorothioate linkage
  modified_base (1)..(25): A phosphodiester linkage may be replaced with a non-ionic amide linkage
  ref <308>: DATABASE ACCESSION NUMBER: genbank/MG021307
  ref <309>: DATABASE ENTRY DATE: 2018-03-05
  ref <313>: RELEVANT RESIDUES IN SEQ ID NO: (229)..(253)
cccaagatcttaaagaagctggctt

SEQ ID NO: 129 - DNA, 25 bp, Epstein Barr virus
  modified_base (1)..(25): A nucleotide ribose may be modified with 2'-O-methyl
  modified_base (1)..(25): A nucleotide ribose may be modified with 2'-O-methoxyethyl
  modified_base (1)..(25): A nucleotide ribose may be modified with 2'-fluorine
  modified_base (1)..(25): A nucleotide ribose may be modified with 2'-fluoroarabinonucleic acid
  modified_base (1)..(25): A nucleotide may contain a methylene bridge between the 2'-O and 4'-C positions of the ribose
  modified_base (1)..(25): A phosphodiester linkage may be replaced with a non-ionic phosphorothioate linkage
  modified_base (1)..(25): A phosphodiester linkage may be replaced with a non-ionic amide linkage
  ref <308>: DATABASE ACCESSION NUMBER: genbank/MG021307
  ref <309>: DATABASE ENTRY DATE: 2018-03-05
  ref <313>: RELEVANT RESIDUES IN SEQ ID NO: (230)..(254)
ccaagatcttaaagaagctggctta

SEQ ID NO: 130 - DNA, 25 bp, Epstein Barr virus
  modified_base (1)..(25): A nucleotide ribose may be modified with 2'-O-methyl
  modified_base (1)..(25): A nucleotide ribose may be modified with 2'-O-methoxyethyl
  modified_base (1)..(25): A nucleotide ribose may be modified with 2'-fluorine
  modified_base (1)..(25): A nucleotide ribose may be modified with 2'-fluoroarabinonucleic acid
  modified_base (1)..(25): A nucleotide may contain a methylene bridge between the 2'-O and 4'-C positions of the ribose
  modified_base (1)..(25): A phosphodiester linkage may be replaced with a non-ionic phosphorothioate linkage
  modified_base (1)..(25): A phosphodiester linkage may be replaced with a non-ionic amide linkage
  ref <308>: DATABASE ACCESSION NUMBER: genbank/MG021307
  ref <309>: DATABASE ENTRY DATE: 2018-03-05
  ref <313>: RELEVANT RESIDUES IN SEQ ID NO: (234)..(258)
gatcttaaagaagctggcttatttc

SEQ ID NO: 131 - DNA, 25 bp, Epstein Barr virus
  modified_base (1)..(25): A phosphodiester linkage may be replaced with a non-ionic amide linkage
  modified_base (1)..(25): A phosphodiester linkage may be replaced with a non-ionic phosphorothioate linkage
  modified_base (1)..(25): A nucleotide may contain a methylene bridge between the 2'-O and 4'-C positions of the ribose
  modified_base (1)..(25): A nucleotide ribose may be modified with 2'-fluoroarabinonucleic acid
  modified_base (1)..(25): A nucleotide ribose may be modified with 2'-fluorine
  modified_base (1)..(25): A nucleotide ribose may be modified with 2'-O-methoxyethyl
  modified_base (1)..(25): A nucleotide ribose may be modified with 2'-O-methyl
tggcttatttcttagagctgctaag

SEQ ID NO: 132 - DNA, 25 bp, Epstein Barr virus
  modified_base (1)..(25): A nucleotide ribose may be modified with 2'-O-methyl
  modified_base (1)..(25): A nucleotide ribose may be modified with 2'-O-methoxyethyl
  modified_base (1)..(25): A nucleotide ribose may be modified with 2'-fluorine
  modified_base (1)..(25): A nucleotide ribose may be modified with 2'-fluoroarabinonucleic acid
  modified_base (1)..(25): A nucleotide may contain a methylene bridge between the 2'-O and 4'-C positions of the ribose
  modified_base (1)..(25): A phosphodiester linkage may be replaced with a non-ionic phosphorothioate linkage
  modified_base (1)..(25): A phosphodiester linkage may be replaced with a non-ionic amide linkage
  ref <308>: DATABASE ACCESSION NUMBER: genbank/MG021307
  ref <309>: DATABASE ENTRY DATE: 2018-03-05
  ref <313>: RELEVANT RESIDUES IN SEQ ID NO: (368)..(392)
ccctgattaggaaactgcgccaaga

SEQ ID NO: 133 - DNA, 25 bp, Epstein Barr virus
  modified_base (1)..(25): A phosphodiester linkage may be replaced with a non-ionic amide linkage
  modified_base (1)..(25): A phosphodiester linkage may be replaced with a non-ionic phosphorothioate linkage
  modified_base (1)..(25): A nucleotide may contain a methylene bridge between the 2'-O and 4'-C positions of the ribose
  modified_base (1)..(25): A nucleotide ribose may be modified with 2'-fluoroarabinonucleic acid
  modified_base (1)..(25): A nucleotide ribose may be modified with 2'-fluorine
  modified_base (1)..(25): A nucleotide ribose may be modified with 2'-O-methoxyethyl
  modified_base (1)..(25): A nucleotide ribose may be modified with 2'-O-methyl
  ref <308>: DATABASE ACCESSION NUMBER: genbank/MG021307
  ref <309>: DATABASE ENTRY DATE: 2018-03-05
  ref <313>: RELEVANT RESIDUES IN SEQ ID NO: (465)..(489)
cctctgcaagtttcgcagatgcatt

SEQ ID NO: 134 - DNA, 25 bp, Epstein Barr virus
  modified_base (1)..(25): A nucleotide ribose may be modified with 2'-O-methyl
  modified_base (1)..(25): A nucleotide ribose may be modified with 2'-O-methoxyethyl
  modified_base (1)..(25): A nucleotide ribose may be modified with 2'-fluorine
  modified_base (1)..(25): A nucleotide ribose may be modified with 2'-fluoroarabinonucleic acid
  modified_base (1)..(25): A nucleotide may contain a methylene bridge between the 2'-O and 4'-C positions of the ribose
  modified_base (1)..(25): A phosphodiester linkage may be replaced with a non-ionic phosphorothioate linkage
  modified_base (1)..(25): A phosphodiester linkage may be replaced with a non-ionic amide linkage
  ref <308>: DATABASE ACCESSION NUMBER: genbank/MG021307
  ref <309>: DATABASE ENTRY DATE: 2018-03-05
  ref <313>: RELEVANT RESIDUES IN SEQ ID NO: (650)..(674)
gcaagtttcgcagatgcatttacta

SEQ ID NO: 135 - DNA, 25 bp, Epstein Barr virus
  modified_base (1)..(25): A phosphodiester linkage may be replaced with a non-ionic amide linkage
  modified_base (1)..(25): A phosphodiester linkage may be replaced with a non-ionic phosphorothioate linkage
  modified_base (1)..(25): A nucleotide may contain a methylene bridge between the 2'-O and 4'-C positions of the ribose
  modified_base (1)..(25): A nucleotide ribose may be modified with 2'-fluoroarabinonucleic acid
  modified_base (1)..(25): A nucleotide ribose may be modified with 2'-fluorine
  modified_base (1)..(25): A nucleotide ribose may be modified with 2'-O-methoxyethyl
  modified_base (1)..(25): A nucleotide ribose may be modified with 2'-O-methyl
  ref <308>: DATABASE ACCESSION NUMBER: genbank/MG021307
  ref <309>: DATABASE ENTRY DATE: 2018-03-05
  ref <313>: RELEVANT RESIDUES IN SEQ ID NO: (658)..(682)
cgcagatgcatttactataactaca

SEQ ID NO: 136 - DNA, 25 bp, Epstein Barr virus
  modified_base (1)..(25): A nucleotide ribose may be modified with 2'-O-methyl
  modified_base (1)..(25): A nucleotide ribose may be modified with 2'-O-methoxyethyl
  modified_base (1)..(25): A nucleotide ribose may be modified with 2'-fluorine
  modified_base (1)..(25): A nucleotide ribose may be modified with 2'-fluoroarabinonucleic acid
  modified_base (1)..(25): A nucleotide may contain a methylene bridge between the 2'-O and 4'-C positions of the ribose
  modified_base (1)..(25): A phosphodiester linkage may be replaced with a non-ionic phosphorothioate linkage
  modified_base (1)..(25): A phosphodiester linkage may be replaced with a non-ionic amide linkage
  ref <308>: DATABASE ACCESSION NUMBER: genbank/MG021307
  ref <309>: DATABASE ENTRY DATE: 2018-03-05
  ref <313>: RELEVANT RESIDUES IN SEQ ID NO: (860)..(884)
gcgctgaatacatagacctactgaa

SEQ ID NO: 137 - DNA, 25 bp, Epstein Barr virus
  modified_base (1)..(25): A phosphodiester linkage may be replaced with a non-ionic amide linkage
  modified_base (1)..(25): A phosphodiester linkage may be replaced with a non-ionic phosphorothioate linkage
  modified_base (1)..(25): A nucleotide may contain a methylene bridge between the 2'-O and 4'-C positions of the ribose
  modified_base (1)..(25): A nucleotide ribose may be modified with 2'-fluoroarabinonucleic acid
  modified_base (1)..(25): A nucleotide ribose may be modified with 2'-fluorine
  modified_base (1)..(25): A nucleotide ribose may be modified with 2'-O-methoxyethyl
  modified_base (1)..(25): A nucleotide ribose may be modified with 2'-O-methyl
  ref <308>: DATABASE ACCESSION NUMBER: genbank/LN824206
  ref <309>: DATABASE ENTRY DATE: 2015-09-24
  ref <313>: RELEVANT RESIDUES IN SEQ ID NO: (390)..(414)
gaacgcccagtatgcagtctcaatc

SEQ ID NO: 138 - DNA, 25 bp, Epstein Barr virus
  modified_base (1)..(25): A nucleotide ribose may be modified with 2'-O-methyl
  modified_base (1)..(25): A nucleotide ribose may be modified with 2'-O-methoxyethyl
  modified_base (1)..(25): A nucleotide ribose may be modified with 2'-fluorine
  modified_base (1)..(25): A nucleotide ribose may be modified with 2'-fluoroarabinonucleic acid
  modified_base (1)..(25): A nucleotide may contain a methylene bridge between the 2'-O and 4'-C positions of the ribose
  modified_base (1)..(25): A phosphodiester linkage may be replaced with a non-ionic phosphorothioate linkage
  modified_base (1)..(25): A phosphodiester linkage may be replaced with a non-ionic amide linkage
  ref <308>: DATABASE ACCESSION NUMBER: genbank/LN824206
  ref <309>: DATABASE ENTRY DATE: 2015-09-24
  ref <313>: RELEVANT RESIDUES IN SEQ ID NO: (393)..(417)
cgcccagtatgcagtctcaatctct

SEQ ID NO: 139 - DNA, 25 bp, Epstein Barr virus
  modified_base (1)..(25): A phosphodiester linkage may be replaced with a non-ionic amide linkage
  modified_base (1)..(25): A phosphodiester linkage may be replaced with a non-ionic phosphorothioate linkage
  modified_base (1)..(25): A nucleotide may contain a methylene bridge between the 2'-O and 4'-C positions of the ribose
  modified_base (1)..(25): A nucleotide ribose may be modified with 2'-fluoroarabinonucleic acid
  modified_base (1)..(25): A nucleotide ribose may be modified with 2'-O-methyl
  modified_base (1)..(25): A nucleotide ribose may be modified with 2'-O-methoxyethyl
  modified_base (1)..(25): A nucleotide ribose may be modified with 2'-fluorine
  ref <308>: DATABASE ACCESSION NUMBER: genbank/LN824206
  ref <309>: DATABASE ENTRY DATE: 2015-09-24
  ref <313>: RELEVANT RESIDUES IN SEQ ID NO: (394)..(418)
gcccagtatgcagtctcaatctctc

SEQ ID NO: 140 - DNA, 25 bp, Epstein Barr virus
  modified_base (1)..(25): A nucleotide ribose may be modified with 2'-fluorine
  modified_base (1)..(25): A nucleotide ribose may be modified with 2'-O-methyl
  modified_base (1)..(25): A nucleotide ribose may be modified with 2'-O-methoxyethyl
  modified_base (1)..(25): A nucleotide ribose may be modified with 2'-fluoroarabinonucleic acid
  modified_base (1)..(25): A nucleotide may contain a methylene bridge between the 2'-O and 4'-C positions of the ribose
  modified_base (1)..(25): A phosphodiester linkage may be replaced with a non-ionic phosphorothioate linkage
  modified_base (1)..(25): A phosphodiester linkage may be replaced with a non-ionic amide linkage
  ref <308>: DATABASE ACCESSION NUMBER: genbank/LN824206
  ref <309>: DATABASE ENTRY DATE: 2015-09-24
  ref <313>: RELEVANT RESIDUES IN SEQ ID NO: (453)..(477)
ggctcaaacgctgcttggtaatctg

SEQ ID NO: 141 - DNA, 25 bp, Epstein Barr virus
  modified_base (1)..(25): A phosphodiester linkage may be replaced with a non-ionic amide linkage
  modified_base (1)..(25): A phosphodiester linkage may be replaced with a non-ionic phosphorothioate linkage
  modified_base (1)..(25): A nucleotide may contain a methylene bridge between the 2'-O and 4'-C positions of the ribose
  modified_base (1)..(25): A nucleotide ribose may be modified with 2'-fluoroarabinonucleic acid
  modified_base (1)..(25): A nucleotide ribose may be modified with 2'-fluorine
  modified_base (1)..(25): A nucleotide ribose may be modified with 2'-O-methoxyethyl
  modified_base (1)..(25): A nucleotide ribose may be modified with 2'-O-methyl
  ref <308>: DATABASE ACCESSION NUMBER: genbank/LN824206
  ref <309>: DATABASE ENTRY DATE: 2015-09-24
  ref <313>: RELEVANT RESIDUES IN SEQ ID NO: (461)..(485)
cgctgcttggtaatctgtacgggaa

SEQ ID NO: 142 - DNA, 25 bp, Epstein Barr virus
  modified_base (1)..(25): A nucleotide ribose may be modified with 2'-O-methyl
  modified_base (1)..(25): A nucleotide ribose may be modified with 2'-O-methoxyethyl
  modified_base (1)..(25): A nucleotide ribose may be modified with 2'-fluorine
  modified_base (1)..(25): A nucleotide ribose may be modified with 2'-fluoroarabinonucleic acid
  modified_base (1)..(25): A nucleotide may contain a methylene bridge between the 2'-O and 4'-C positions of the ribose
  modified_base (1)..(25): A phosphodiester linkage may be replaced with a non-ionic phosphorothioate linkage
  modified_base (1)..(25): A phosphodiester linkage may be replaced with a non-ionic amide linkage
  ref <308>: DATABASE ACCESSION NUMBER: genbank/LN824206
  ref <309>: DATABASE ENTRY DATE: 2015-09-24
  ref <313>: RELEVANT RESIDUES IN SEQ ID NO: (593)..(617)
ccaactccgtctccctaaagctgat

SEQ ID NO: 143 - DNA, 25 bp, Epstein Barr virus
  modified_base (1)..(25): A phosphodiester linkage may be replaced with a non-ionic amide linkage
  modified_base (1)..(25): A phosphodiester linkage may be replaced with a non-ionic phosphorothioate linkage
  modified_base (1)..(25): A nucleotide may contain a methylene bridge between the 2'-O and 4'-C positions of the ribose
  modified_base (1)..(25): A nucleotide ribose may be modified with 2'-fluoroarabinonucleic acid
  modified_base (1)..(25): A nucleotide ribose may be modified with 2'-fluorine
  modified_base (1)..(25): A nucleotide ribose may be modified with 2'-O-methoxyethyl
  modified_base (1)..(25): A nucleotide ribose may be modified with 2'-O-methyl
  ref <308>: DATABASE ACCESSION NUMBER: genbank/LN824206
  ref <309>: DATABASE ENTRY DATE: 2015-09-24
  ref <313>: RELEVANT RESIDUES IN SEQ ID NO: (559)..(583)
ccgtctccctaaagctgatgacaga

SEQ ID NO: 144 - DNA, 25 bp, Epstein Barr virus
  modified_base (1)..(25): A nucleotide ribose may be modified with 2'-O-methyl
  modified_base (1)..(25): A nucleotide ribose may be modified with 2'-O-methoxyethyl
  modified_base (1)..(25): A nucleotide ribose may be modified with 2'-fluorine
  modified_base (1)..(25): A nucleotide ribose may be modified with 2'-fluoroarabinonucleic acid
  modified_base (1)..(25): A nucleotide may contain a methylene bridge between the 2'-O and 4'-C positions of the ribose
  modified_base (1)..(25): A phosphodiester linkage may be replaced with a non-ionic phosphorothioate linkage
  modified_base (1)..(25): A phosphodiester linkage may be replaced with a non-ionic amide linkage
  ref <308>: DATABASE ACCESSION NUMBER: genbank/LN824206
  ref <309>: DATABASE ENTRY DATE: 2015-09-24
  ref <313>: RELEVANT RESIDUES IN SEQ ID NO: (600)..(624)
cgtctccctaaagctgatgacagaa

SEQ ID NO: 145 - DNA, 25 bp, Epstein Barr virus
  modified_base (1)..(25): A phosphodiester linkage may be replaced with a non-ionic amide linkage
  modified_base (1)..(25): A phosphodiester linkage may be replaced with a non-ionic phosphorothioate linkage
  modified_base (1)..(25): A nucleotide may contain a methylene bridge between the 2'-O and 4'-C positions of the ribose
  modified_base (1)..(25): A nucleotide ribose may be modified with 2'-fluoroarabinonucleic acid
  modified_base (1)..(25): A nucleotide ribose may be modified with 2'-fluorine
  modified_base (1)..(25): A nucleotide ribose may be modified with 2'-O-methoxyethyl
  modified_base (1)..(25): A nucleotide ribose may be modified with 2'-O-methyl
  ref <308>: DATABASE ACCESSION NUMBER: genbank/LN824206
  ref <309>: DATABASE ENTRY DATE: 2015-09-24
  ref <313>: RELEVANT RESIDUES IN SEQ ID NO: (605)..(629)
ccctaaagctgatgacagaagtggt

SEQ ID NO: 146 - DNA, 25 bp, Epstein Barr virus
  modified_base (1)..(25): A nucleotide ribose may be modified with 2'-O-methyl
  modified_base (1)..(25): A nucleotide ribose may be modified with 2'-O-methoxyethyl
  modified_base (1)..(25): A nucleotide ribose may be modified with 2'-fluorine
  modified_base (1)..(25): A nucleotide ribose may be modified with 2'-fluoroarabinonucleic acid
  modified_base (1)..(25): A nucleotide may contain a methylene bridge between the 2'-O and 4'-C positions of the ribose
  modified_base (1)..(25): A phosphodiester linkage may be replaced with a non-ionic phosphorothioate linkage
  modified_base (1)..(25): A phosphodiester linkage may be replaced with a non-ionic amide linkage
  ref <308>: DATABASE ACCESSION NUMBER: genbank/LN824206
  ref <309>: DATABASE ENTRY DATE: 2015-09-24
  ref <313>: RELEVANT RESIDUES IN SEQ ID NO: (1478)..(1502)
ccctctttgagattatcaaccagaa

SEQ ID NO: 147 - DNA, 747 bp, Artificial Sequence
  Synthesized oligonucleotide constructed by fusing nucleotides encoding one protein, TetR (tetracycline repressor), found in Escherichia coli bacteria, with the activation domain of another protein, VP16, found in the Herpes Simplex Virus.
  ref <301>: AUTHORS: Shin, Kum-Joo; Wall, Estelle A.; Zavzavadjian, Joelle R.; Santat, Leah A.; Liu, Jamie; Hwang, Jong-Ik; Rebres, Robert; Roach, Tamara; Seaman, William; Simon, Melvin I.; Fraser, Iain D. C.
  ref <302>: TITLE: A single lentiviral vector platform for microRNA-based conditional RNA interference and coordinated transgene expression
  ref <303>: JOURNAL: Proc Natl Acad Sci U S A
  ref <304>: VOLUME: 103
  ref <305>: ISSUE: 37
  ref <306>: PAGES: 13759-64
  ref <307>: DATE: 2006-09-12
  ref <308>: DATABASE ACCESSION NUMBER: addgene.org
  ref <309>: DATABASE ENTRY DATE: 2006-09-12
  ref <313>: RELEVANT RESIDUES IN SEQ ID NO: (5401)..(6141)
atgtctagactggacaagagcaaagtcataaacggagctctggaattactcaatggtgtcggtatcgaaggcctgacgacaaggaaactcgctcaaaagctgggagttgagcagcctaccctgtactggcacgtgaagaacaagcgggccctgctcgatgccctgccaatcgagatgctggacaggcatcatacccacttctgccccctggaaggcgagtcatggcaagactttctgcggaacaacgccaagtcataccgctgtgctctcctctcacatcgcgacggggctaaagtgcatctcggcacccgcccaacagagaaacagtacgaaaccctggaaaatcagctcgcgttcctgtgtcagcaaggcttctccctggagaacgcactgtacgctctgtccgccgtgggccactttacactgggctgcgtattggaggaacaggagcatcaagtagcaaaagaggaaagagagacacctaccaccgattctatgcccccacttctgagacaagcaattgagctgttcgaccggcagggagccgaacctgccttccttttcggcctggaactaatcatatgtggcctggagaaacagctaaagtgcgaaagcggcgggccgaccgacgcccttgacgattttgacttagacatgctcccagccgatgcccttgacgactttgaccttgatatgctgcctgctgacgctcttgacgattttgaccttgacatgctccccgggtaa

SEQ ID NO: 148 - DNA, 315 bp, Artificial Sequence
  The synthesized oligonucleotide is composed of 7 repeats of the 19 base pair tetracycline response element from Escherichia coli bacteria combined with the CMV promoter.
  ref <301>: AUTHORS: van der Wal, Tanne; Lambooij, Jan-Paul; van Amerongen, Ren?e
  ref <302>: TITLE: TMEM98 is a negative regulator of FRAT mediated Wnt/?-catenin signalling
  ref <303>: JOURNAL: PloS one
  ref <304>: VOLUME: 15
  ref <305>: ISSUE: 1
  ref <306>: PAGES: 1-23
  ref <307>: DATE: 2020-01-21
  ref <308>: DATABASE ACCESSION NUMBER: addgene.org/plasmid 124506
  ref <309>: DATABASE ENTRY DATE: 2020-01-21
  ref <313>: RELEVANT RESIDUES IN SEQ ID NO: (2272)..(2586)
ggcgatctgacggttcactaaacgagctctgcttatataggcctcccaccgtacacgcctacctcgacatacgttctctatcactgatagggagtaaactcgacatacgttctctatcactgatagggataaactcgacatacgttctctatcactgatagggagtaaactcgacatacgttctctatcactgatagggagtaaactcgacatacgttctctatcactgatagggagtaaactcgacatcgttctctatcactgatagggagtaaactcgacatacgttctctatcactgatagggagtaaactc

SEQ ID NO: 149 - DNA, 1595 bp, Homo sapiens
  ref <308>: DATABASE ACCESSION NUMBER: genbank/NM_000657
  ref <309>: DATABASE ENTRY DATE: 2021-04-20
  ref <313>: RELEVANT RESIDUES IN SEQ ID NO: (1)..(1595)
acccctcgccgcaccacacacagcgcgggcttctagcgctcggcaccggcgggccaggcgcgtcctgccttcatttatccagcagcttttcggaaaatgcatttgctgttcggagtttaatcagaagaggattcctgcctccgtccccggctccttcatcgtcccctctcccctgtctctctcctggggaggcgtgaagcggtcccgtggatagagattcatgcctgtgcccgcgcgtgtgtgcgcgcgtgtaaattgccgagaaggggaaaacatcacaggacttctgcgaataccggactgaaaattgtaattcatctgccgccgccgctgccttttttttttctcgagctcttgagatctccggttgggattcctgcggattgacatttctgtgaagcagaagtctgggaatcgatctggaaatcctcctaatttttactccctctccccgcgactcctgattcattgggaagtttcaaatcagctataactggagagtgctgaagattgatgggatcgttgccttatgcatttgttttggttttacaaaaaggaaacttgacagaggatcatgctgtacttaaaaaatacaacatcacagaggaagtagactgatattaacaatacttactaataataacgtgcctcatgaaataaagatccgaaaggaattggaataaaaatttcctgcatctcatgccaagggggaaacaccagaatcaagtgttccgcgtgattgaagacaccccctcgtccaagaatgcaaagcacatccaataaaatagctggattataactcctcttctttctctgggggccgtggggtgggagctggggcgagaggtgccgttggcccccgttgcttttcctctgggaaggatggcgcacgctgggagaacagggtacgataaccgggagatagtgatgaagtacatccattataagctgtcgcagaggggctacgagtgggatgcgggagatgtgggcgccgcgcccccgggggccgcccccgcaccgggcatcttctcctcccagcccgggcacacgccccatccagccgcatcccgggacccggtcgccaggacctcgccgctgcagaccccggctgcccccggcgccgccgcggggcctgcgctcagcccggtgccacctgtggtccacctgaccctccgccaggccggcgacgacttctcccgccgctaccgccgcgacttcgccgagatgtccagccagctgcacctgacgcccttcaccgcgcggggacgctttgccacggtggtggaggagctcttcagggacggggtgaactgggggaggattgtggccttctttgagttcggtggggtcatgtgtgtggagagcgtcaaccgggagatgtcgcccctggtggacaacatcgccctgtggatgactgagtacctgaaccggcacctgcacacctggatccaggataacggaggctgggtaggtgcacttggtgatgtgagtctgggctgaggccacaggtccgagatgcgggggttggagtgcgggtgggctcctggggcaatgggaggctgtggagccggcgaaataaaatcagagttgttgct

SEQ ID NO: 150 - DNA, 926 bp, Homo sapiens
  ref <308>: DATABASE ACCESSION NUMBER: genbank/Z23115.1
  ref <309>: DATABASE ENTRY DATE: 2008-10-07
  ref <313>: RELEVANT RESIDUES IN SEQ ID NO: (1)..(926)
gaatctctttctctcccttcagaatcttatcttggctttggatcttagaagagaatcactaaccagagacgagactcagtgagtgagcaggtgttttggacaatggactggttgagcccatccctattataaaaatgtctcagagcaaccgggagctggtggttgactttctctcctacaagctttcccagaaaggatacagctggagtcagtttagtgatgtggaagagaacaggactgaggccccagaagggactgaatcggagatggagacccccagtgccatcaatggcaacccatcctggcacctggcagacagccccgcggtgaatggagccactgcgcacagcagcagtttggatgcccgggaggtgatccccatggcagcagtaaagcaagcgctgagggaggcaggcgacgagtttgaactgcggtaccggcgggcattcagtgacctgacatcccagctccacatcaccccagggacagcatatcagagctttgaacaggtagtgaatgaactcttccgggatggggtaaactggggtcgcattgtggcctttttctccttcggcggggcactgtgcgtggaaagcgtagacaaggagatgcaggtattggtgagtcggatcgcagcttggatggccacttacctgaatgaccacctagagccttggatccaggagaacggcggctgggatacttttgtggaactctatgggaacaatgcagcagccgagagccgaaagggccaggaacgcttcaaccgctggttcctgacgggcatgactgtggccggcgtggttctgctgggctcactcttcagtcggaaatgaccagacactgaccatccactctaccctcccacccccttctctgctccaccacatcctccgtccagccgccattgccaccaggagaacccg

SEQ ID NO: 151 - DNA, 3491 bp, Homo sapiens
  ref <308>: DATABASE ACCESSION NUMBER: genbank/NM_001197320
  ref <309>: DATABASE ENTRY DATE: 2021-03-22
  ref <313>: RELEVANT RESIDUES IN SEQ ID NO: (1)..(3491)
acttctcacttccgcttccttccagtaaggagtcggggtcttccccagttttctcagccaggcggcggcggcgactggcaatgtttggcctcaaaagaaacgcggtaatcggactcaacctctactgtgggggggccggcttgggggccggcagcggcggcgccacccgcccgggagggcgacttttggccaccggcgccaaggacacaaagccaatgggcaggtctggggccaccagcaggaaggcgctggagaccttacgacgggttggggatggcgtgcagcgcaaccacgagacggccttccaaggcatgcttcggaaactggacatcaaaaacgaagacgatgtgaaatcgttgtctcgagtgatgatccatgttttcagcgacggcgtaacaaactggggcaggattgtgactctcatttcttttggtgcctttgtggctaaacacttgaagaccataaaccaagaaagctgcatcgaaccattagcagaaagtatcacagacgttctcgtaaggacaaaacgggactggctagttaaacaaagaggctgggatgggtttgtggagttcttccatgtagaggacctagaaggtggcatcaggaatgtgctgctggcttttgcaggtgttgctggagtaggagctggtttggcatatctaataagatagccttactgtaagtgcaatagttgacttttaaccaaccaccaccaccaccaaaaccagtttatgcagttggactccaagctgtaacttcctagagttgcaccctagcaacctagccagaaaagcaagtggcaagaggattatggctaacaagaataaatacatgggaagagtgctccccattgattgaagagtcactgtctgaaagaagcaaagttcagtttcagcaacaaacaaactttgtttgggaagctatggaggaggacttttagatttagtgaagatggtagggtggaaagacttaatttccttgttgagaacaggaaagtggccagtagccaggcaagtcatagaattgattacccgccgaattcattaatttactgtagtgttaagagaagcactaagaatgccagtgacctgtgtaaaagttacaagtaatagaactatgactgtaagcctcagtactgtacaagggaagcttttcctctctctaattagctttcccagtatacttcttagaaagtccaagtgttcaggacttttatacctgttatactttggcttggtttccatgattcttactttattagcctagtttatcaccaataatacttgacggaaggctcagtaattagttatgaatatggatatcctcaattcttaagacagcttgtaaatgtatttgtaaaaattgtatatatttttacagaaagtctatttctttgaaacgaaggaagtatcgaatttacattagtttttttcatacccttttgaactttgcaacttccgtaattaggaacctgtttcttacagcttttctatgctaaactttgttctgttcagttctagagtgtatacagaacgaattgatgtgtaactgtatgcagactggttgtagtggaacaaatctgataactatgcaggtttaaattttcttatctgattttggtaagtattccttaggtttttctttgaaaacctgggattgagaggttgatgaatggaaattctttcacttcattatatgcaagttttcaataattaggtctaagtggagttttaaggttactgatgacttacaaataatgggctctgattgggcaatactcatttgagttccttccatttgacctaatttaactggtgaaatttaaagtgaattcatgggctcatctttaaagcttttactaaaagattttcagctgaatggaactcattagctgtgtgcatataaaaagatcacatcaggtggatggagagacatttgatcccttgtttgcttaataaattataaaatgatggcttggaaaagcaggctagtctaaccatggtgctattattaggcttgcttgttacacacacaggtctaagcctagtatgtcaataaagcaaatacttactgttttgtttctattaatgattcccaaaccttgttgcaagtttttgcattggcatctttggatttcagtcttgatgtttgttctatcagacttaaccttttatttcctgtccttccttgaaattgctgattgttctgctccctctacagatatttatatcaattcctacagctttcccctgccatccctgaactctttctagcccttttagattttggcactgtgaaacccctgctggaaacctgagtgaccctccctccccaccaagagtccacagacctttcatctttcacgaacttgatcctgttagcaggtggtaataccatgggtgctgtgacactaacagtcattgagaggtgggaggaagtcccttttccttggactggtatcttttcaactattgttttatcctgtctttgggggcaatgtgtcaaaagtcccctcaggaattttcagaggaaagaacattttatgaggctttctctaaagtttcctttgtataggagtatgctcacttaaatttacagaaagaggtgagctgtgttaaacctcagagtttaaaagctactgataaactgaagaaagtgtctatattggaactagggtcatttgaaagcttcagtctcggaacatgacctttagtctgtggactccatttaaaaataggtatgaataagatgactaagaatgtaatggggaagaactgccctgcctgcccatctcagagccataaggtcatctttgctagagctatttttacctatgtatttatcgttcttgatcataagccgcttatttatatcatgtatctctaaggacctaaaagcactttatgtagtttttaattaatcttaagatctggttacggtaactaaaaaagcctgtctgccaaatccagtggaaacaagtgcatagatgtgaattggtttttaggggccccacttcccaattcattaggtatgactgtggaaatacagacaaggatcttagttgatattttgggcttggggcagtgagggcttaggacaccccaagtggtttgggaaaggaggaggggagtggtgggtttatagggggaggaggaggcaggtggtctaagtgctgactggctacgtagttcgggcaaatcctccaaaagggaaagggaggatttgcttagaaggatggcgctcccagtgactactttttgacttctgtttgtcttacgcttctctcagggaaaaacatgcagtcctctagtgtttcatgtacattctgtggggggtgaacaccttggttctggttaaacagctgtacttttgatagctgtgccaggaagggttaggaccaactacaaattaatgttggttgtcaaatgtagtgtgtttccctaactttctgtttttcctgagaaaaaaaaataaatcttttattcaaa

SEQ ID NO: 152 - DNA, 737 bp, Homo sapiens
  ref <308>: DATABASE ACCESSION NUMBER: genbank/U27467
  ref <309>: DATABASE ENTRY DATE: 1995-11-29
  ref <313>: RELEVANT RESIDUES IN SEQ ID NO: (1)..(737)
ccagctcaagactttgctctccaccaggcagaagatgacagactgtgaatttggatatatttacaggctggctcaggactatctgcagtgcgtcctacagataccacaacctggatcaggtccaagcaaaacgtccagagtgctacaaaatgttgcgttctcagtccaaaaagaagtggaaaagaatctgaagtcatgcttggacaatgttaatgttgtgtccgtagacactgccagaacactattcaaccaagtgatggaaaaggagtttgaagacggcatcattaactggggaagaattgtaaccatatttgcatttgaaggtattctcatcaagaaacttctacgacagcaaattgccccggatgtggatacctataaggagatttcatattttgttgcggagttcataatgaataacacaggagaatggataaggcaaaacggaggctgggaaaatggctttgtaaagaagtttgaacctaaatctggctggatgacttttctagaagttacaggaaagatctgtgaaatgctatctctcctgaagcaatactgttgaccagaaaggacactccatattgtgaaaccggcctaatttttctgactgatatggaaacgattgccaacacatacttctacttttaaataaacaactttgatgatgtaacttgaccttccagagttatggaaattttgtccccatgtaatgaataaattgtatgtatttttctcta

SEQ ID NO: 153 - DNA, 582 bp, Homo sapiens
  ref <308>: DATABASE ACCESSION NUMBER: genbank/U59747
  ref <309>: DATABASE ENTRY DATE: 1996-09-29
  ref <313>: RELEVANT RESIDUES IN SEQ ID NO: (1)..(582)
atggcgaccccagcctcggccccagacacacgggctctggtggcagactttgtaggttataagctgaggcagaagggttatgtctgtggagctggccccggggagggcccagcagctgacccgctgcaccaagccatgcgggcagctggagatgagttcgagacccgcttccggcgcaccttctctgatctggcggctcagctgcatgtgaccccaggctcagcccagcaacgcttcacccaggtctccgacgaactttttcaagggggccccaactggggccgccttgtagccttctttgtctttggggctgcactgtgtgctgagagtgtcaacaaggagatggaaccactggtgggacaagtgcaggagtggatggtggcctacctggagacgcggctggctgactggatccacagcagtgggggctgggcggagttcacagctctatacggggacggggccctggaggaggcgcggcgtctgcgggaggggaactgggcatcagtgaggacagtgctgacgggggccgtggcactgggggccctggtaactgtaggggccttttttgctagcaagtga

SEQ ID NO: 154 - DNA, 1249 bp, Homo sapiens
  ref <308>: DATABASE ACCESSION NUMBER: genbank/NM_020396.4
  ref <309>: DATABASE ENTRY DATE: 2021-02-21
  ref <313>: RELEVANT RESIDUES IN SEQ ID NO: (1)..(1249)
cgggccaagaaaaccagcgaaggcccggccccccagcagaggccggaccatggttgaccagttgcgggagcgcaccaccatggccgacccgctgcgggagcgcaccgagctgttgctggccgactacctggggtactgcgcccgggaacccggcacccccgagccggcgccatccacgcccgaggccgccgtgctgcgctccgcggccgccaggttacggcagattcaccggtcctttttctccgcctacctcggctaccccgggaaccgcttcgagctggtggcgctgatggcggattccgtgctctccgacagccccggccccacctggggcagagtggtgacgctcgtgaccttcgcagggacgctgctggagagagggccgctggtgaccgcccggtggaagaagtggggcttccagccgcggctaaaggagcaggagggcgacgtcgcccgggactgccagcgcctggtggccttgctgagctcgcggctcatggggcagcaccgcgcctggctgcaggctcagggcggctgggatggcttttgtcacttcttcaggaccccctttccactggctttttggagaaaacagctggtccaggcttttctgtcatgcttgttaacaacagccttcatttatctctggacacgattattatgagttttaaaacttttaacccgcttctacctgcccaactgtgaccaactaaatgacagatgtgtgagaacaagaactgagggaaagcaccttcccccaccccagacgtttttatctgaatgcatacaaggagtcctgaggtggtgatttggccagtgttttaacttgtgacaagtactcaggtgtgaggacaagaatgcaaatggctcttccttgagtgaaagaaatggggagtctagagcctctttatgccaaagaaccgcagaagaaactgcattccattaaatgggaaatacagtgctatttgctaaaacttggataagagtgcgaacctctcatctctccacaacttcatgtgctgctgactaattttaaacatggccacagctggggcaaaataatccccaaagtagaaaaagtcccagtttaacaaagaatgtaatgttaaaatcacttataaggaattctttgaaaccaaatcctttgaaatctaattcctgggacttctaggtttttatagttaacatactaatttcttcaataattgttaactgcaaagttttaataaatttgtacctttaaaaaaaa

SEQ ID NO: 155 - DNA, 386 bp, Homo sapiens
  ref <308>: DATABASE ACCESSION NUMBER: genbank/DQ227257
  ref <309>: DATABASE ENTRY DATE: 2007-01-27
  ref <313>: RELEVANT RESIDUES IN SEQ ID NO: (1)..(386)
atgggtgccccgacgttgccccctgcctggcagccctttctcaaggaccaccgcatctctacattcaagaactggcccttcttggagggctgcgcctgcaccccggagcggatggccgaggctggcttcatccactgccccactgagaacgagccagacttggcccagtgtttcttctgcttcaaggagctggaaggctgggagccagatgacgaccccatgagagagctctgttagcagaatgaaaaaattggaagccagattcagggagggactggaagcaaaagaatttctgttcgaggaagagcctgatgtttgccagggtctgtttaactggacatgaagaggaaggctctggactttcctccaggagtttcaggagaaag

SEQ ID NO: 156 - DNA, 51 bp, Encephalomyocarditis virus
  ref <308>: DATABASE ACCESSION NUMBER: genbank/DL233381
  ref <309>: DATABASE ENTRY DATE: 2008-11-20
  ref <313>: RELEVANT RESIDUES IN SEQ ID NO: (1)..(51)
cccgagccggcgggtgcgggcggtggcagcggggcccggatgggcgcccgg

SEQ ID NO: 157 - protein, 239 aa, Homo sapiens
  ref <308>: DATABASE ACCESSION NUMBER: genbank/NP_000624
  ref <309>: DATABASE ENTRY DATE: 2021-04-19
  ref <313>: RELEVANT RESIDUES IN SEQ ID NO: (1)..(239)
MAHAGRTGYDNREIVMKYIHYKLSQRGYEWDAGDVGAAPPGAAPAPGIFSSQPGHTPHPAASRDPVARTSPLQTPAAPGAAAGPALSPVPPVVHLTLRQAGDDFSRRYRRDFAEMSSQLHLTPFTARGRFATVVEELFRDGVNWGRIVAFFEFGGVMCVESVNREMSPLVDNIALWMTEYLNRHLHTWIQDNGGWDAFVELYGPSMRPLFDFSWLSLKTLLSLALVGACITLGAYLGHK

SEQ ID NO: 158 - protein, 233 aa, Homo sapiens [sequence omitted]

SEQ ID NO: 159 - protein, 350 aa, Homo sapiens [sequence omitted]

SEQ ID NO: 160 - protein, 175 aa, Homo sapiens
  ref <308>: DATABASE ACCESSION NUMBER: genbank/AAC50288
  ref <309>: DATABASE ENTRY DATE: 1995-11-29
  ref <313>: RELEVANT RESIDUES IN SEQ ID NO: (1)..(175)
MTDCEFGYIYRLAQDYLQCVLQIPQPGSGPSKTSRVLQNVAFSVQKEVEKNLKSCLDNVNVVSVDTARTLFNQVMEKEFEDGIINWGRIVTIFAFEGILIKKLLRQQIAPDVDTYKEISYFVAEFIMNNTGEWIRQNGGWENGFVKKFEPKSGWMTFLEVTGKICEMLSLLKQYC

SEQ ID NO: 161 - protein, 193 aa, Homo sapiens
  ref <308>: DATABASE ACCESSION NUMBER: genbank/AAB09055
  ref <309>: DATABASE ENTRY DATE: 1996-09-29
  ref <313>: RELEVANT RESIDUES IN SEQ ID NO: (1)..(193)
MATPASAPDTRALVADFVGYKLRQKGYVCGAGPGEGPAADPLHQAMRAAGDEFETRFRRTFSDLAAQLHVTPGSAQQRFTQVSDELFQGGPNWGRLVAFFVFGAALCAESVNKEMEPLVGQVQEWMVAYLETRLADWIHSSGGWAEFTALYGDGALEEARRLREGNWASVRTVLTGAVALGALVTVGAFFASK

SEQ ID NO: 162 - protein, 241 aa, Homo sapiens
  ref <308>: DATABASE ACCESSION NUMBER: genbank/NP_001293097
  ref <309>: DATABASE ENTRY DATE: 2021-02-14
  ref <313>: RELEVANT RESIDUES IN SEQ ID NO: (1)..(241)
MVDQLRERTTMADPLRERTELLLADYLGYCAREPGTPEPAPSTPEAAVLRSAAARLRQIHRSFFSAYLGYPGNRFELVALMADSVLSDSPGPTWGRVVTLVTFAGTLLERGPLVTARWKKWGFQPRLKEQEGDVARDCQRLVALLSSRLMGQHRAWLQAQGGWVSTRRTPGHGAGRAAGKRPRGWHGWLLSLLQDPLSTGFLEKTAGPGFSVMLVNNSLHLSLDTIIMSFKTFNPLLPAQL

SEQ ID NO: 163 - protein, 142 aa, Homo sapiens
  ref <308>: DATABASE ACCESSION NUMBER: genbank/ AAC51660
  ref <309>: DATABASE ENTRY DATE: 2004-09-02
  ref <313>: RELEVANT RESIDUES IN SEQ ID NO: (1)..(142)
MGAPTLPPAWQPFLKDHRISTFKNWPFLEGCACTPERMAEAGFIHCPTENEPDLAQCFFCFKELEGWEPDDDPIEEHKKHSSGCAFLSVKKQFEELTLGEFLKLDRERAKNKIAKETNNKKKEFEETAKKVRRAIEQLAAMD

SEQ ID NO: 164 - DNA, 130 bp, Homo sapiens
  ref <301>: AUTHORS: Nott, Ajit; Meislin, Shlomo H.; Moore, Melissa J.
  ref <302>: TITLE: A quantitative analysis of intron effects on mammalian gene expression
  ref <303>: JOURNAL: RNA
  ref <304>: VOLUME: 9
  ref <305>: ISSUE: 5
  ref <306>: PAGES: 607-617
  ref <307>: DATE: 2003-05-09
  ref <308>: DATABASE ACCESSION NUMBER: genbank/NG_011948.1
  ref <309>: DATABASE ENTRY DATE: 2003-05-09
  ref <313>: RELEVANT RESIDUES IN SEQ ID NO: (7718)..(7846)
ggtgagtggctttggttcccggctgaggtggagtgggctgaggactagactgagccctcggacatggaggtggggatggggcagactcatcccattcttgaccaagcccttgttctgctcccttcccagg

SEQ ID NO: 165 - DNA, 20 bp, Epstein Barr virus
  modified_base (1)..(20): A phosphodiester linkage may be replaced with a non-ionic amide linkage
  modified_base (1)..(20): A phosphodiester linkage may be replaced with a non-ionic phosphorothioate linkage
  modified_base (1)..(20): A nucleotide may contain a methylene bridge between the 2'-O and 4'-C positions of the ribose
  modified_base (1)..(20): A nucleotide ribose may be modified with 2'-fluoroarabinonucleic acid
  modified_base (1)..(20): A nucleotide ribose may be modified with 2'-fluorine
  modified_base (1)..(20): A nucleotide ribose may be modified with 2'-O-methoxyethyl
  modified_base (1)..(20): A nucleotide ribose may be modified with 2'-O-methyl
  ref <308>: DATABASE ACCESSION NUMBER: genbank/NC_007605
  ref <309>: DATABASE ENTRY DATE: 2018-08-13
  ref <313>: RELEVANT RESIDUES IN SEQ ID NO: (11336)..(11355)
agatcagatggcatagagac

SEQ ID NO: 166 - DNA, 20 bp, Epstein Barr virus
  modified_base (1)..(20): A nucleotide ribose may be modified with 2'-O-methyl
  modified_base (1)..(20): A nucleotide ribose may be modified with 2'-O-methoxyethyl
  modified_base (1)..(20): A nucleotide ribose may be modified with 2'-fluorine
  modified_base (1)..(20): A nucleotide ribose may be modified with 2'-fluoroarabinonucleic acid
  modified_base (1)..(20): A nucleotide may contain a methylene bridge between the 2'-O and 4'-C positions of the ribose
  modified_base (1)..(20): A phosphodiester linkage may be replaced with a non-ionic phosphorothioate linkage
  modified_base (1)..(20): A phosphodiester linkage may be replaced with a non-ionic amide linkage
  ref <308>: DATABASE ACCESSION NUMBER: genbank/NC_007605.1
  ref <309>: DATABASE ENTRY DATE: 2013-08-13
  ref <313>: RELEVANT RESIDUES IN SEQ ID NO: (97635)..(97654)
cccccgcactaaagaataaa

SEQ ID NO: 167 - DNA, 20 bp, Epstein Barr virus
  modified_base (1)..(20): A phosphodiester linkage may be replaced with a non-ionic amide linkage
  modified_base (1)..(20): A phosphodiester linkage may be replaced with a non-ionic phosphorothioate linkage
  modified_base (1)..(20): A nucleotide may contain a methylene bridge between the 2'-O and 4'-C positions of the ribose
  modified_base (1)..(20): A nucleotide ribose may be modified with 2'-fluoroarabinonucleic acid
  modified_base (1)..(20): A nucleotide ribose may be modified with 2'-fluorine
  modified_base (1)..(20): A nucleotide ribose may be modified with 2'-O-methoxyethyl
  modified_base (1)..(20): A nucleotide ribose may be modified with 2'-O-methyl
  ref <308>: DATABASE ACCESSION NUMBER: genbank/NC_007605
  ref <309>: DATABASE ENTRY DATE: 2018-08-13
  ref <313>: RELEVANT RESIDUES IN SEQ ID NO: (21217)..(21236)
ctggacacatgtgccagacg

SEQ ID NO: 168 - DNA, 20 bp, Epstein Barr virus
  modified_base (1)..(20): A nucleotide ribose may be modified with 2'-O-methyl
  modified_base (1)..(20): A nucleotide ribose may be modified with 2'-O-methoxyethyl
  modified_base (1)..(20): A nucleotide ribose may be modified with 2'-fluorine
  modified_base (1)..(20): A nucleotide ribose may be modified with 2'-fluoroarabinonucleic acid
  modified_base (1)..(20): A nucleotide may contain a methylene bridge between the 2'-O and 4'-C positions of the ribose
  modified_base (1)..(20): A phosphodiester linkage may be replaced with a non-ionic phosphorothioate linkage
  modified_base (1)..(20): A phosphodiester linkage may be replaced with a non-ionic amide linkage
  ref <308>: DATABASE ACCESSION NUMBER: genbank/007605.1
  ref <309>: DATABASE ENTRY DATE: 2018-08-13
  ref <313>: RELEVANT RESIDUES IN SEQ ID NO: (24269)..(24288)
tacccttttagaaccacagc

SEQ ID NO: 169 - DNA, 20 bp, Epstein Barr virus
  modified_base (1)..(20): A phosphodiester linkage may be replaced with a non-ionic amide linkage
  modified_base (1)..(20): A phosphodiester linkage may be replaced with a non-ionic phosphorothioate linkage
  modified_base (1)..(20): A nucleotide may contain a methylene bridge between the 2'-O and 4'-C positions of the ribose
  modified_base (1)..(20): A nucleotide ribose may be modified with 2'-fluoroarabinonucleic acid
  modified_base (1)..(20): A nucleotide ribose may be modified with 2'-fluorine
  modified_base (1)..(20): A nucleotide ribose may be modified with 2'-O-methoxyethyl
  modified_base (1)..(20): A nucleotide ribose may be modified with 2'-O-methyl
  ref <308>: DATABASE ACCESSION NUMBER: genbank/NC_007605.1
  ref <309>: DATABASE ENTRY DATE: 2015-09-24
  ref <313>: RELEVANT RESIDUES IN SEQ ID NO: (11626)..(11645)
gactgaagaaacagcctcct

SEQ ID NO: 170 - DNA, 20 bp, Epstein Barr virus
  modified_base (1)..(20): A terminal nucleotide ribose may be modified with a 2'-O-methyl
  modified_base (1)..(20): A nucleotide ribose may be modified with 2'-O-methoxyethyl
  modified_base (1)..(20): A nucleotide ribose may be modified with 2'-fluorine
  modified_base (1)..(20): A nucleotide ribose may be modified with 2'-fluoroarabinonucleic acid
  modified_base (1)..(20): A nucleotide may contain a methylene bridge between the 2'-O and 4'-C positions of the ribose
  modified_base (1)..(20): A phosphodiester linkage may be replaced with a non-ionic phosphorothioate linkage
  modified_base (1)..(20): A phosphodiester linkage may be replaced with a non-ionic amide linkage
  ref <308>: DATABASE ACCESSION NUMBER: genbank/NC_007605.1
  ref <309>: DATABASE ENTRY DATE: 2018-08-13
  ref <313>: RELEVANT RESIDUES IN SEQ ID NO: (14554)..(14573)
cctaggggagaccgaagtga

SEQ ID NO: 171 - DNA, 20 bp, Epstein Barr virus
  modified_base (1)..(20): A phosphodiester linkage may be replaced with a non-ionic amide linkage
  modified_base (1)..(20): A nucleotide ribose may be modified with 2'-O-methoxyethyl
  modified_base (1)..(20): A phosphodiester linkage may be replaced with a non-ionic phosphorothioate linkage
  modified_base (1)..(20): A nucleotide may contain a methylene bridge between the 2'-O and 4'-C positions of the ribose
  modified_base (1)..(20): A nucleotide ribose may be modified with 2'-fluoroarabinonucleic acid
  modified_base (1)..(20): A nucleotide ribose may be modified with 2'-fluorine
  modified_base (1)..(20): A nucleotide ribose may be modified with 2'-O-methyl
  ref <308>: DATABASE ACCESSION NUMBER: genbankNC_007605.1
  ref <309>: DATABASE ENTRY DATE: 2018-08-13
  ref <313>: RELEVANT RESIDUES IN SEQ ID NO: (166483)..(166502)
tttatttattgcatcacaag

SEQ ID NO: 172 - DNA, 20 bp, Epstein Barr virus
  modified_base (1)..(20): A nucleotide ribose may be modified with 2'-O-methyl
  modified_base (1)..(20): A nucleotide ribose may be modified with 2'-O-methoxyethyl
  modified_base (1)..(20): A nucleotide ribose may be modified with 2'-fluorine
  modified_base (1)..(20): A nucleotide ribose may be modified with 2'-fluoroarabinonucleic acid
  modified_base (1)..(20): A nucleotide may contain a methylene bridge between the 2'-O and 4'-C positions of the ribose
  modified_base (1)..(20): A phosphodiester linkage may be replaced with a non-ionic phosphorothioate linkage
  modified_base (1)..(20): A phosphodiester linkage may be replaced with a non-ionic amide linkage
  ref <308>: DATABASE ACCESSION NUMBER: genbank/NC_007605.1
  ref <309>: DATABASE ENTRY DATE: 2018-08-13
  ref <313>: RELEVANT RESIDUES IN SEQ ID NO: (168488)..(168507)
tttatttattgcatcacaag

SEQ ID NO: 173 - protein, 5339 aa, Streptococcus pyogenes
  ref <308>: DATABASE ACCESSION NUMBER: genbank/ NZ_CP010450
  ref <309>: DATABASE ENTRY DATE: 2015-01-15
  ref <313>: RELEVANT RESIDUES IN SEQ ID NO: (763869)..(767975)
TCCCTTGAAAGATCCTGTGATTTGGATCCTTCCAGAAGTCTTTTTCTTGCACTGTTTCCTTTTCTTTATGATAGTTTACGAAATCATCCTGTGGAGCTTAGTAGGTTTAGCAAGACGGCAGCGCCTAAATGTAGAATGATAAAAGGATTAAGAGATTAATTTCCCTAAAAATGATAAAACAAGCGTTTTGAAAGCGCTTGTTTTTTAGTTTGCAGTCAGAGTAGAATAGAAGTATCAAAAAAAGCACCGACTCGGTGCCACTTTTTCAAGTTGATAACGGACTAGCCTTATTTTAACTTGCTATGCTGTTTTGAATGGTTCCAACAAGATTATTTTATAACTTTTATAACAAATAATCAAGGAGAAATTCAAAGAAATTTATCAGCCATAAAACAATACTTAATACTATAGAATGATAACAAAATAAACTACTTTTTAAAAGAATTTCGTGTTATAATCTATTTATTATTAAGTATTGGGTAATATTTTTTGAAGAGATGTTTTGAAAAAGAAAAATTAAAGCATATTAAACTAATTTCGGAGGTCATTAAAACTATTAGTGAAATCATCAAACTCATTATGGATTTAATTTAAACTTTTTATTTTAGGAGGCAAAAATGGATAAGAAATACTCAATAGGCTTAGATATCGGCACAAATAGCGTCGGATGGGCGGTGATCACTGATGATTATAAGGTTCCGTCTAAAAAGTTCAAGGTTCTGGGAAATACAGACCGCCACAGTATCAAAAAAAATCTTATAGGGGCTCTTTTATTTGACAGTGGAGAGACAGCGGAAGCGACTCGTCTCAAACGGACAGCTCGTAGAAGGTATACACGTCGGAAGAATCGTATTTGTTATCTACAGGAGATTTTTTCAAATGAGATGGCGAAAGTAGATGATAGTTTCTTTCATCGACTTGAAGAGTCTTTTTTGGTGGAAGAAGACAAGAAGCATGAACGTCATCCTATTTTTGGAAATATAGTAGATGAAGTTGCTTATCATGAGAAATATCCAACTATCTATCATCTGCGAAAAAAATTGGCAGATTCTACTGATAAAGCGGATTTGCGCTTAATCTATTTGGCCTTAGCGCATATGATTAAGTTTCGTGGTCATTTTTTGATTGAGGGAGATTTAAATCCTGATAATAGTGATGTGGACAAACTATTTATCCAGTTGGTACAAACCTACAATCAATTATTTGAAGAAAACCCTATTAACGCAAGTAGAGTAGATGCTAAAGCGATTCTTTCTGCACGATTGAGTAAATCAAGACGATTAGAAAATCTCATTGCTCAGCTCCCCGGTGAGAAGAAAAATGGCTTATTTGGGAATCTCATTGCTTTGTTATTGGGATTGACCCCTAATTTTAAATCAAATTTTGATTTGGCAGAAGATGCTAAATTACAGCTTTCAAAAGATACTTACGATGATGATTTAGATAATTTATTGGCGCAAATTGGAGATCAATATGCTGATTTGTTTTTGGCAGCTAAGAATTTATCAGATGCTATTTTACTTTCAGATATCCTAAGAGTAAATAGTGAAATAACTAAGGCTCCCCTATCAGCTTCAATGATTAAACGCTACGATGAACATCATCAAGACTTGACTCTTTTAAAAGCTTTAGTTCGACAACAACTTCCAGAAAAGTATAAAGAAATCTTTTTTGATCAATCAAAAAACGGATATGCAGGTTATATTGATGGGGGAGCTAGCCAAGAAGAATTTTATAAATTTATCAAACCAATTTTAGAAAAAATGGATGGTACTGAGGAATTATTGGCGAAACTAAATCGTGAAGATTTGCTGCGCAAGCAACGGACCTTTGACAACGGCTCTATTCCCCATCAAATTCACTTGGGTGAGCTGCATGCTATTTTGAGAAGACAAGAAGACTTTTATCCATTTTTAAAAGACAATCGTGAGAAGATTGAAAAAATCTTGACTTTTCGAATTCCTTATTATGTTGGTCCATTGGCGCGTGGCAATAGTCGTTTTGCATGGATGACTCGGAAGTCTGAAGAAACAATTACCCCATGGAATTTTGAAGAAGTTGTCGATAAAGGTGCTTCAGCTCAATCATTTATTGAACGCATGACAAACTTTGATAAAAATCTTCCAAATGAAAAAGTACTACCAAAACATAGTTTGCTTTATGAGTATTTTACGGTTTATAACGAATTGACAAAGGTCAAATATGTTACTGAGGGAATGCGAAAACCAGCATTTCTTTCAGGTGAACAGAAGAAAGCCATTGTTGATTTACTCTTCAAAACAAATCGAAAAGTAACCGTTAAGCAATTAAAAGAAGATTATTTCAAAAAAATAGAATGTTTTGATAGTGTTGAAATTTCAGGCGTTGAAGATCGGTTTAATGCGTCATTAGGTACCTACCATGATTTGCTAAAAATTATCAAAGATAAAGATTTTTTGGATAATGAAGAAAATGAAGATATTTTAGAGGATATTGTTTTAACATTGACCTTATTTGAAGATAAGGAAATGATTGAGGAACGACTTAAAAAGTATGCTCACCTCTTTGATGATAAGGTGATGAAACAGCTTAAACGTCGCCGTTATACTGGTTGGGGACGTTTGTCTCGAAAATTGATTAATGGTATTAGGGATAAGCAATCTGGCAAAACAATATTAGATTTTTTGAAATCAGATGGTTTTGCCAATCGCAATTTTATGCAGCTGATCCATGATGATAGTTTGACATTTAAAGAAGATATTCAAAAAGCACAAGTGTCTGGACAAGGCGATAGTTTACATGAACATATTGCAAATTTAGCTGGTAGCCCTGCTATTAAAAAAGGTATTTTACAGACTGTAAAAGTTGTTGATGAATTGGTCAAAGTAATGGGGCGGCATAAGCCAGAAAATATCGTTATTGAAATGGCACGTGAAAATCAGACAACTCAAAAGGGCCAGAAAAATTCGCGTGAGCGTATGAAACGTATTGAAGAAGGAATAAAAGAACTAGGAAGTGATATTCTAAAGGAGTATCCTGTTGAAAACACTCAATTACAAAATGAAAAGCTCTATCTCTATTATCTCCAAAATGGAAGAGACATGTATGTGGACCAAGAATTAGATATTAATCGTTTAAGTGATTATGATGTCGATCACATTGTTCCACAAAGTTTCCTTAAAGACGATTCAATAGACAATAAGGTGTTAACGCGTTCTGATAAAAATCGTGGTAAATCGGATAACGTTCCAAGTGAAGAAGTAGTCAAAAAGATGAAAAACTATTGGAAACAACTTCTAAACGCCAAGTTAATCACTCAACGTAAGTTTGATAATTTAACAAAAGCTGAACGTGGAGGTTTGAGTGAACTTGATAAAGCTGGTTTTATCAAACGCCAATTGGTTGAAACTCGCCAAATCACTAAGCATGTGGCACAAATTTTGGATAGTCGCATGAATACTAAATACGATGAAAATGATAAACTTATTCGAGAGGTTAGAGTGATTACCTTAAAATCTAAATTAGTTTCTGACTTCCGAAAAGATTTCCAATTCTATAAAGTACGTGAGATTAACAATTACCATCATGCCCATGATGCGTATCTTAATGCCGTCGTTGGAACTGCTTTGATTAAGAAATATCCAAAACTTGAATCGGAGTTTGTCTATGGTGATTATAAAGTTTATGATGTTCGTAAAATGATTGCTAAGTCTGAGCAGGAAATAGGCAAAGCAACCGCAAAATATTTCTTTTACTCTAATATCATGAACTTCTTCAAAACAGAAATTACACTTGCAAATGGAGAGATTCGCAAACGCCCTCTAATCGAAACTAATGGGGAAACTGGAGAAATTGTCTGGGATAAAGGGCGAGATTTTGCCACAGTGCGCAAAGTATTGTCCATGCCCCAAGTCAATATTGTCAAGAAAACAGAAGTACAGACAGGCGGATTCTCCAAGGAGTCAATTTTACCAAAAAGAAATTCGGACAAGCTTATTGCTCGTAAAAAAGACTGGGATCCAAAAAAATATGGTGGTTTTGATAGTCCAACGGTAGCTTATTCAGTCCTAGTGGTTGCTAAGGTGGAAAAAGGGAAATCGAAGAAGTTAAAATCCGTTAAAGAGTTACTAGGGATCACAATTATGGAAAGAAGTTCCTTTGAAAAAAATCCGATTGACTTTTTAGAAGCTAAAGGATATAAGGAAGTTAGAAAAGACTTAATCATTAAACTACCTAAATATAGTCTTTTTGAGTTAGAAAACGGTCGTAAACGGATGCTGGCTAGTGCCGGAGAATTACAAAAAGGAAATGAGCTGGCTCTGCCAAGCAAATATGTGAATTTTTTATATTTAGCTAGTCATTATGAAAAGTTGAAGGGTAGTCCAGAAGATAACGAACAAAAACAATTGTTTGTGGAGCAGCATAAGCATTATTTAGATGAGATTATTGAGCAAATCAGTGAATTTTCTAAGCGTGTTATTTTAGCAGATGCCAATTTAGATAAAGTTCTTAGTGCATATAACAAACATAGAGACAAACCAATACGTGAACAAGCAGAAAATATTATTCATTTATTTACGTTGACGAATCTTGGAGCTCCCGCTGCTTTTAAATATTTTGATACAACAATTGATCGTAAACGATATACGTCTACAAAAGAAGTTTTAGATGCCACTCTTATCCATCAATCCATCACTGGTCTTTATGAAACACGCATTGATTTGAGTCAGCTAGGAGGTGACTGATGGCTGGTTGGCGTACTGTTGTGGTAAATACCCACTCGAAATTATCCTATAAGAATAATCATCTGATTTTTAAGGATGCCTATAAAACGGAGCTGATCCATTTATCAGAAATTGATATTTTGTTATTAGAAACGACCGATATTGTCTTGTCCACTATGCTGGTAAAACGGCTAGTGGATGAGAATGTCCTTGTCATATTCTGTGATGATAAACGATTACCAACAGCTATGCTGATGCCTTTTTATGGTCGTCATGATTCGAGTCTACAGCTTGGGAAACAAATGTCCTGGTCAGAAACAGTCAAATCGCAGGTCTGGACGACGATTATTGCTCAAAAGATTTTGAATCAATCTTGCTATTTAGGAGCATGCTCCTATTTTGAAAAATCCCAATCTATTATGGATTTATATCATGGTTTGGAAAATTTTGATCCGAGTAATCGAGAAGGGCATGCAGCGAGAATTTATTTTAATACACTTTTTGGGAACGATTTCTCAAGAGATTTGGAGCATCCAATCAATGCAGGTCTGGATTATGGTTATACTTTATTATTGAGTATGTTTGCGCGTGAAGTGGTTGTGTCTGGATGTATGACTCAATTTGGACTCAAACACG

SEQ ID NO: 174 - DNA, 264 bp, Homo sapiens
  ref <308>: DATABASE ACCESSION NUMBER: genbank/JN255693
  ref <309>: DATABASE ENTRY DATE: 2012-05-31
  ref <313>: RELEVANT RESIDUES IN SEQ ID NO: (1)..(264)
aaggtcgggcaggaagagggcctatttcccatgattccttcatatttgcatatacgatacaaggctgttagagagataattagaattaatttgactgtaaacacaaagatattagtacaaaatacgtgacgtagaaagtaataatttcttgggtagtttgcagttttaaaattatgttttaaaatggactatcatatgcttaccgtaacttgaaagtatttcgatttcttggctttatatatcttgtggaaaggacgaaacacc

SEQ ID NO: 175 - DNA, 204 bp, Human cytomegalovirus
  ref <301>: AUTHORS: Shin, Kum-Joo; Wall, Estelle A.; Zavzavadjian, Joelle R.; Santat, Leah A.; Liu, Jamie; Hwang, Jong-Ik; Rebres, Robert; Roach, Tamara; Seaman, William; Simon, Melvin I.; Fraser, Iain D. C.
  ref <302>: TITLE: A single lentiviral vector platform for microRNA-based conditional RNA interference and coordinated transgene expression
  ref <303>: JOURNAL: Proceedings of the National Academy of Sciences
  ref <304>: VOLUME: 103
  ref <305>: ISSUE: 37
  ref <306>: PAGES: 13759-13764
  ref <307>: DATE: 2006-09-12
  ref <308>: DATABASE ACCESSION NUMBER: addgene.org/pSLIK-Neo
  ref <309>: DATABASE ENTRY DATE: 2006-09-12
  ref <313>: RELEVANT RESIDUES IN SEQ ID NO: (1)..(204)
gtgatgcggttttggcagtacatcaatgggcgtggatagcggtttgactcacggggatttccaagtctccaccccattgacgtcaatgggagtttgttttggcaccaaaatcaacgggactttccaaaatgtcgtaacaactccgccccattgacgcaaatgggcggtaggcgtgtacggtgggaggtctatataagcagagct

SEQ ID NO: 176 - DNA, 304 bp, Human cytomegalovirus
  ref <301>: AUTHORS: Shin, Kum-Joo; Wall, Estelle A.; Zavzavadjian, Joelle R.; Santat, Leah A.; Liu, Jamie; Hwang, Jong-Ik; Rebres, Robert; Roach, Tamara; Seaman, William
  ref <302>: TITLE: A single lentiviral vector platform for microRNA-based conditional RNA interference and coordinated transgene expression
  ref <303>: JOURNAL: Proceedings of the National Academy of Sciences
  ref <304>: VOLUME: 103
  ref <305>: ISSUE: 37
  ref <306>: PAGES: 13759-13764
  ref <307>: DATE: 2006-09-12
  ref <308>: DATABASE ACCESSION NUMBER: addgene.org/pSLIK-Neo
  ref <309>: DATABASE ENTRY DATE: 2006-09-12
  ref <313>: RELEVANT RESIDUES IN SEQ ID NO: (1)..(304)
cgttacataacttacggtaaatggcccgcctggctgaccgcccaacgacccccgcccattgacgtcaataatgacgtatgttcccatagtaacgccaatagggactttccattgacgtcaatgggtggagtatttacggtaaactgcccacttggcagtacatcaagtgtatcatatgccaagtacgccccctattgacgtcaatgacggtaaatggcccgcctggcattatgcccagtacatgaccttatgggactttcctacttggcagtacatctacgtattagtcatcgctattaccatg

SEQ ID NO: 177 - protein, 7 aa, Homo sapiens
  ref <301>: AUTHORS: Harley, Vincent R.; Layfield, Sharon; Mitchell, Claire L.; Forwood, Jade K.; John, Anna P.; Briggs, Lyndall J.; McDowall, Sharon G.; Jans, David A.
  ref <302>: TITLE: Defective importin beta recognition and nuclear import of the sex-determining factor SRY are associated with XY sex-reversing mutations
  ref <303>: JOURNAL: Proc Natl Acad Sci U S A.
  ref <304>: VOLUME: 100
  ref <305>: ISSUE: 12
  ref <306>: PAGES: 7045-7050
  ref <307>: DATE: 2003-06-10
RPRRKAK

1-20. (canceled)

21. An RNA or DNA oligonucleotide drug composed of at least two oligonucleotides, wherein the oligonucleotide sequence is comprised of at least 7 contiguous nucleotides that are at least 70% identical to any of the sequences selected from SEQ ID NOs 3-24, and SEQ ID NOs 27-146.

22. The RNA or DNA oligonucleotide drug according to claim 21, wherein oligonucleotide modifications are comprised of locked nucleic acids, 2′-O-methyl, 2′-O-methoxyethyl, 2′-fluorine, 2′-fluoroarabinonucleic acid, and wherein nucleotide linkages are comprised of phosphorothioate or an amide.

23. Oligonucleotide drug according to claim 22, wherein the selected oligonucleotides are conjugated to a targeting moiety.

24. An oligonucleotide drug according to claim 22, wherein the selected oligonucleotides are complexed in a lipid nanoparticle or incorporated in liposomes.

25. An oligonucleotide drug according to claim 24, wherein the lipid nanoparticle or liposome is conjugated to a targeting moiety.

26. The lipid nanoparticle or liposome according to claim 24, wherein the oligonucleotide drug is further comprised of oligonucleotides selected from SEQ ID NOs 149-155, and wherein oligonucleotide modifications are comprised of locked nucleic acids, 2′-O-methyl, 2′-O-methoxyethyl, 2′-fluorine, 2′-fluoroarabinonucleic acid, and wherein nucleotide linkages are comprised of phosphorothioate or an amide.

27. The lipid nanoparticle or liposome according to claim 24 that is further comprised of proteins with a sequence selected from SEQ ID NOs 157-163.

28. An oligonucleotide drug according to claim 21, wherein the oligonucleotide sequences are inserted into an expression construct and delivered in a viral vector.

29. An expression construct according to claim 28, wherein the expression construct further contains oligonucleotide sequences selected from SEQ ID NOs 149-155.

30. A method of treating EBV infection in a patient by delivering to a patient an RNA or DNA oligonucleotide drug composed of at least two oligonucleotide sequences, wherein the oligonucleotide sequence is comprised of at least 7 contiguous nucleotides that are least 70% identical to at least two sequences selected from SEQ ID NOs 3-24 and 27-146.

31. A method according to claim 30, wherein oligonucleotide modifications are comprised of locked nucleic acids, 2′-O-methyl, 2′-O-methoxyethyl, 2′-fluorine, 2′-fluoroarabinonucleic acid, and wherein nucleotide linkages are comprised of phosphorothioate or an amide.

32. A method according to claim 31, wherein the selected oligonucleotides are delivered conjugated to a targeting moiety.

33. A method according to claim 31, wherein the selected oligonucleotides are delivered in a lipid nanoparticle or liposome.

34. A method according to claim 33, wherein the lipid nanoparticle or liposome is conjugated to a targeting moiety.

35. A method according to claim 33, wherein the lipid nanoparticle or liposome is further comprised of oligonucleotide sequences selected from SEQ ID NOs 149-155, and wherein the oligonucleotide modifications are comprised of locked nucleic acids, 2′-O-methyl, 2′-O-methoxyethyl, 2′-fluorine, 2′-fluoroarabinonucleic acid, and wherein nucleotide linkages are comprised of phosphorothioate or an amide.

36. A method according to claim 33, wherein the lipid nanoparticle or liposome is further comprised of proteins with sequences selected from SEQ ID NOs 157-163.

37. A method according to claim 30, wherein an oligonucleotide drug is delivered to a patient by inserting the oligonucleotide sequences into an expression construct within a viral vector, and wherein the virus is delivered to the patient by transduction.

38. A method according to claim 37, wherein the construct expression is regulated by an upstream tetracycline-transactivator transcription domain (SEQ ID NO 148).

39. A method according to claim 38, wherein the viral vector contains a second expression construct comprised of the sequence encoding the reverse tetracycline-transactivator (SEQ ID NO 147) and sequences selected from SEQ ID NOs 149-155, and wherein an internal ribosome entry site is inserted between the sequences.

40. A method according to claim 38, wherein the patient is administered doxycycline to induce construct expression.
